United States Patent Application Publication US 2026/0191916 A1 - sequence listing, part 85

SEQ ID NO: 584 - DNA, 5283006 bp, Bacteroides ovatus (residues 1-1,761,002 of 5,283,006)
  source 1..5283006: mol_type = genomic DNA
gcctcctcgacgatgagctgtttgcgtacccccttgagccgtctcatcttgtttatgaaagcctccatgatgataatggtgaccacgggaaaaagctccttgttttccttgatggaatccacctcgaagaccacgaagcgcttcgagagcaggtcgatgttggcccgggagttcagaaggaagtcgtagcgtccgcccttataatactgccgcagggtgatgagcatgttgtcgatgttgaaatcctcgcggctgacccggatctcccgctcctccagctcgcggcggtagtcgtcccgcaggtactcgtagaaactgtcaaaacacggcacgatattccggtcggcgcggatacgctcgatataggcgttcacggcactgcccagctcgccgctctcggtcttcgtgatcttgtcgtcctcggttttccagagtgtcagcagcagcgtcttgatgctgtccttcttctccacgtcgaaatagtagtcgtcggtgtagaacgggttgaaactgatgggatgttcctcggtataggtaaaatacacgccgtcctcacctttggtcttacgccggatcagctcgcaaagaccctggtagctgttaccggtatccaccagcacgacatgcgtgccctgctcccagtattggcggactaaatgattcataaagaatgacttgcctgaccccgagccgcctaacacgaatttattccggttggctataattaatgtgtataattttctatctatttaatactgaatatcatgtatttatagcgtagaatatatcaatattaacattttacaaacatgcaatttgcatacaaatagagtggttataagaaaacagaaaaggatatttgttgttaatgggtaaatgtggtaggagatgtttttatatctgttttccctcgtttttcagtgaaaaatagacatgatacaggcgaaaagaagaatactgtttttcttttcgcctgtatatatattttgctgtctataaaagtaggtttagttcgttttggatatatagacaaagggataaactaaacttgcaatgtataggaaagccttttcttgaatattaaaagttaatttgttcaaacttaataagaaaaaaatagcttaacaagctgttctattattaactttccctatatttgagtgttgtttatatgactggttatgaaatattttctacccatattatttatattttctttcaatcttgtcagcccacttttagcacaagacaagaattgtgcagatatgtctgctttattagagaacaaaatatggaaagtgcaacttcctaaagacaaacaatatgcaatggaaatggaatttcgtagtgccggatggagaactacgtttctatatgatgaaaaacaaaccaaaacattttattcctattctttgcatggagatactatcaaagtttttgaatcggggaaaaattgtatcattcaagaacttacagatagtactctgacattcctttatctaccggaaagtttgacaatcggagttgcgcctgttagatgtacaacagataacagtattcaagggctacgagagaacgaaaaacgattggatagtatttggcgcaaagaagatatttggaacaagggtactgctcctatcaataaaactcaggctatcaaagaatatccccgatgggctgtatgggattatgacttggaaaagtatttcgtttctcaaatgaaataccccaaagagttactgaaaaagaatgtggcaggtcattctgttgtgatgttttccatcgacacactgggtttacctcgtgaaatcaatattctgactactatccataaagagtttgacaaagaaataattagattaacaaaagaacttccacactgtctgccttgcagggataagaacggtaaacgaatagaatgcttccatacagtatatgtaccattcttaccacaacattatagagatagagtaaaatcggacagcattgcagaggaagaattgaaacaaagttttgtggaatgggaaactgtgtcttattttgaaaaagcaaatccgtatgcagttaccaactacatcaatgaacgcctaacatacgaccccaagctattgaacggcaaaaaagaagccaaagggatttatacgatacgaattgattcttacggagaaataataaaggtagaaaccttacgaagttgtggcatacctgaatgggataagcaagtattgcaaatcataaaaggtatgccacggtggactcctaccatcaattattacgggaaaggtgaatatcacaactccgtttggactgtacctgttttatttaaaaatgataatcggtaaatccttgaatgaacatcgtgattataattgaattatcaaaacagaaattaaatttaaactaaaaaatgggaacattaggctgtataaatgatatgctacaacgggacaaagagaaccgtgagcttcgcaaattgaataaagaaaggatgaaagaacatcataaatacctcgtaaacaagggaaaaaatattaatttatccaacatttccattgaaacgatagaggaaatccgtaaaaataccatagcaaaagaacagtcagaccaaatttatctattcaaggcatatataatttttgcaatatgccttttaggattatttttattgggcatactttgttataaattattcttctgaatacctaacgacatgctgtccgaagaaaaataaatgaatttgaaaagccgggcgataaacatgattcatcactccggctttactccacttatggcttacctagtttatcggcttcctttctcaacagctcggcttgttcattgagtagccttgcacgctccaacgcttccgcctgcttcctgctgcgatactcaaaatctatcacagaatcggttagactttggataaaaccgttatccctctgccaattgaatttggtttccagtatatcaaagacttccccgtctgcctgtccttgcatcagcaaatagcggtatttcatatcgttgtcctgcaactgctgcatacgttcagccaaacggacattcaagaatatggaaacggaacagacaaccagcactgccgaaaaaacaaacaattccggacgaatccaagaagcgaccttgttgtaaatccgttgatagaacggtaagggcgtagcttcctctttatccgtcctgcaagagcccaaagtatcaatcatcaccttgaaacaacggtaggtttccaatgttattttcttggtgtcctctatgttcttctgctgaccttgcatcctgctccttatgtcgtcaagttggctttgaataacctgcaacttttcttcgggaacagccgaattactgtgcagttccgacaacgcttgttcgattgttcccagccgttcgagagtttcctcccggctggctggcgttacctgtgcttccagcttctctttcagttccgtaaccatagagagaagcccctctaaaatcaaattgtcttccatgtctttacaatttaagttgttttttctttttcttcttctttctcaaattaaaattaggttcttcatccactgggggagaagaagcggaaaacagaccgagtgaacctgttatcaacgggctgtcagccttgctcggtgcaggtgcctgctcccgaacgggtgcgaaagttgtttgccgttggctttcggcaacattcattcctgcatccccgaaacatttatccagtttggaaaaactgaaactgcggtctatctccgaacccttgaacgtgtattcgcctttggaaatggatatgccctgtatctcgcttgtctgtcccttatacttgaactggatagcaatacccatttccgctaaccgctgctgtaactgctgccagttacgggatttgccgatttcattctttacagccgtgtaaatctcgtatttcgacttgtccggctctttcaatcggtgctgcttcacctgctctttccccttggcgaaataaagcccgtgtttggctttcagcttcttgcatacctgttcgttacggtacatgtcgttcctgtccgaaatgctcttgccgttgttgtctatgcggttgaacacgatatgcacatgtggatgttcccggtcttggtggcgcacgatgatatactgcgtatcggtgattttcatttcacgcatatactcctgcgcaagctgtatcatcttcccgtccgtcaatttaggtgcatccactgccgaatagcttaacgcaatatgtcctaccggctttttcaagtcgggattcatcccggtctgcatacagaagctgcggattatatcgctccggctttccgtcagaaccccgtccgcatgaagcaaaaccgcctgctccttgccaagcacatagttcacacagcccttaaaaccgcttcccttttttatttttccaatcatccgacaaatggtttatgatttcaacaatcctatctttgagcttcaaaagttccaccgcaaccagtgcgaaacctccggcattcgcccggtgcgccaactgattgatgttgttggcttcccctgccagcttgcggatggtgtccgcatcctgcctgttcagccgggggatgacctctgccgaaacaaccgcctgccggacatactcactgatacgtaacccggcttccccggctcgctttctgatggcgtaatactgcaactcggtcagtttcgtactgactacttttttctgcttgtccgtccgtttttttgccggacgaccgcccggcttgtcctgtatcttcttcatgtctttttacttttaggtggtatattagaaattgcgaccaacgggagcgatttcctttgcggtgagcaaagcaagatggtttcggtataccgaaacataaccttgctctccaaataaaccgccagccgttggtagtcctgccggattaaatgcccctgcctctcttttgtcttgggtcggcacgttgtccagtttcctgcttcgtttcctgcacttggctggctgcgtttttccgttcctgcttcctgccgcacaggtaatcgttcaagtccgaatatcccctgtaattgtgtgagaagtcacgtacacggtaggagtattccaactcgatatcccgtgtcgcttcatatccagccttgtcattgtcaagcatacagtggatgcgttcatacggggacatcacgtcaagggctttcgacacattggcggtagagttaagaatgacataatcctgcctgtcaaggtcgggcatggtcggacagttcctcatgcggagcgtaaggaaagagaggtagtccatgaaaccctcgaacaccagacatttctctctcggctctccctgctgccgtatatgggtgatgtctttcggggcgatacagcctttgaaaaaagagttgcgcacctcataacctcctgtcatgttcgggaaaccgatagcgaagaacggtctgccgttattggtaaaatggagttccttacattctctttttgccagttcgatattgataccccgtccctgcaagtaacggagcaatgccggatgggtaaggtcacggacttccaaatgctggaaactcggttctttcctacgctggggaaaagaaaaactgaccggatggatgtgcggtgtctgttccgctatccggtttaaaaggtatggcaagctgtcggaacaatagagttcctttgccagtgcgatgatgttgccgcccttgcctgcgccaaagtcataccaaaggttgcggtcagtgttcaccttgaaagacggttcgtgttcctcccttaacggtgatttgtaccataagccgttaccctgctgcttgacaggagagtaacctaaactgtgcagatagtctgcgatgggtatttgttttacatcttcgatgttcataacattttcttttttggggattaaaaaatagttgaaaaatgcgccagtcctgtttagttcgttatatatatacccgtaccatactaaacctgcttgttccgatacagggaaatagtaagtccgttcctcttatatatacacccggactaaaccaaactgacttttaataatggaaatcgggattatagcggtaacccttgccctctttcacaatcatgcgcttgttcacaaggaacttgttcagttccacatggatattgcgcccacgctcgtagccgatacttgcatagccttgtttcaaggtctttaggacattctcgtaaccatatataacctgtttgccaaaaccgttttccaaagccgtcctgtgctgttgctccgtcagttctgccagtggaaagcccctgtcttggctgggctgcttgaatacataaccgtccacagcttccggcaatgcgctgtcgttgatacggaatgcgaacgggtcaaactcccggtcacgtatgtgcatcgcctttacctcgcttatgttaccgtcctgctggcttttcgtgatttgcaggacggtttcagccttgttgttcaactccgtaccgatatgcccccttgtgttgtcatcccccttgttcaaatgcagtacggtatggatatgcaggttatatccgcttgaccagcgcatcaagaggttgattaggtctgtcgattcgctggggctgttgatgtcgtacatcaaatcacggattccgtcaatgatgagcaaccccacatcgggcatattttcaagcatataaccgataatctgtttccgcttgtcgggggtctgctctcttagcacgatgaaaacaaaatcgtccctgtccttgtcggtaggcagtccggcaagtcgcaaaatacgctccatgaccttatggcaatggtatttgctctgctcggtatctacatagaggattttccgtttgttcggtggcaggtatgccgaatacttcagtacctcgtcattcttcaacgctgccgcaacaatggcggaaatattgaatgtctttttgctcttggctttgccagtggatgcgctgaaattacccagcgtgccaatggtagagccgttcacccagagtatttcgggcggcacttcgtaagtgtccgtcacctttaaatgaatggttttccaaagggctgcgaaatcctctttctgcatggtaacaccctgcccggcttcttctttcctcttattttccatagttacggattttccggtttgcgctcttggcgatggcgagtgccgcctcgtccttgtcgttcaccctttttgcaaggttttccgcccacgtgagaagctctttccgtgagaaaagtaatttgttcccgtatttgcggaacggcacttccttttttgcggtcagcttgtagagccgtgcctttgaaatcagaaaaccgtgtcgttccagcacctctaccgccacatcgggcgtgaggttgtcgggttcgttcctcggctgggtgaatcctgccaatgactgggaaacggtttcgctcacgatagcccggagttcttcgggcgttgtcaaaataatgtttgtcatattttcttccttttttagttattacttggctaccgtcatagccgttgcaaccggttgatgccgcaaaggaagaataaaagaaaccgattattcaattactaatcacttgacacagaccggacaacttgggacaatgcaggacatccggcaagattggaacgagataaaaaagggacaaacgatgtattggcgatttttgtccttccaacacaccgtttgtcctatgtatgttaagtgattatgcgaatgccgctattttacatcctttaacctttcaagttgggaaacgacttcttttattacgaaatatttgcttcccgacagccctatgtccgaacgggatatgaaaccgagttcctcccaccgggctacggtctgcctgctcacgcccgccattttcgccaatgtcttttggtctatcagttccctgccctcgaatacggggtacttgtatttacgggtggcatggctgaaccttattttctctatcgccttgtccacgtctttgacggcggggggaatatatgattttacttgcagtacggcttcttctatttcgtagcctgcatattcgggattctgcgccagttccccgtaaatggcactgaaacattcaaggtgtctaatcttcaccgtcttggttttcttgttcggcatggctcaatcgaatttggttaataactgcgcattccttatccgctcctcctgctcgaaactggcgaggtagttctccgtgatggcaaggcttgaatgccccaaactctcggatatgtaagcgatgttcgttccgctacgttttaagaccgtcgcataggaatgccgggcggaataggtcgtgaaacgggggacaccgacagcttgggctattttagccaaagcgatgttgcaacggtgcgttacccgtctgacaatattggaaatgacaaattcgtcctccgtgtctttggcatacttgaaaaggaaagtatcgggattcccttcgtccgggtttccccaccgttttataatatcccgcatttcgggagtgagcaccgcccttatttcccgtatatggttggacgtgtgcgatgtcttggagcgtacaaagcagatttcaccgtccacgatgttcccataccgcaagaaaagcatatccctgaaattgattccgttgcacaggtaggagaaaaaccaaaagtcccggtacttttcaacggtcttgctgcccttgtatgtcacgactttttttatctgttccatcgtcaaggctaactttcggctgttgccgctcggaatctcgtactttcccctgccgaacgggtattgggcttctttcaaaatcccgttgcgccttgcgtcattcaccacgcatttaagggctttcatatagaaatttatggtggtgacggtcttgccctcgttccgcaggaacttgtcaaggcgtgacagccagtccgcagaaaccgcagagaacggcacgctgccgcctgcgaaccgttctatgcttttcaacgtgctgcgatagttataataggaatttacctgcccgttgagtttgaatgcgtctattttcccctgtatggctgtgttaagggttgtaccagtacatctgcccaacctcatgctgagcgcatcgaaacagaagtccccacgttccgcaagggcttccacttggctttttatgatggagaaactgttttccacgcttgcccgtatctcaatcagtctgcggctcttgctttcggcaaggatttcccagtcctctttggacaattcctttccggtggaataatatttctgcttgcggttgtgtatcacttgtatcttgacagggaacagaccgcttttcttcgccctgcgtgcatccagtaccgacagtacggatatgccatcttttgaatacttgaacataggctgccttgtttattgttatatgtctattttgtacatacgatttgcatacaaaaatagagattatcggaaaaaatagcaaatcaaaagccaaatcattttcctaacaatctctaaatatcagctatttatatataaattcaaacaatataaaaacggcaaaaatatagggtattattacggttggtaatgatcccttttttcatcggttcgtccgagatgtccaggtgcaggggcctgccgcttatgcggtcgcacagcttgatgccgaaaggactggacgaggatttatagttggtttcctccgtgaagaaacagaccgcgggctcgatgaacgtgtagaacgattcctcggcggggaaatcccccgcattgcccggcatacccgcccagtagagcgtggcggcatccacggtgttgtggcgcgggcggcactccatcagagcgagctggctgcccacatcattgcggatatgccggagctcctgcacgtcgtccgaccaggccagcacgttgaaatgggcccggacggattgaagaccgaacgagtgcgcctcgttgagatactggtcgatccactccttgtttatctggttcccgcgggagtagcgggaaagggactgcatgttacgcgcacgtttctcgaacatacgcaggttttcgtcgctgtcttccaggaacacgtactggttgtaaaggtggtcgcaggaaagcagaagccccacgggggccgcgaacgagagcaggcagtccgaacggtcggtggaaagacgctcgtaacgggtgtccgtacccacgcgccccggcaggtcttccgtgtccgagagcgtgtgcaggcacacccgtttgttgcccacgcgcagaacctcggcccccagctcgatgtcctgaagagaagtcgtctccgagagcgagagggaaaagtaccgctccagcaggcccggacaatccgccgtacccgtgatctcgtcccccgtgaggcggacaagggccaagaaacccgaatcgttcagaatacgctcgaactgttccgccgcctccaggaattttgtcgccgattcccggtttacctctttgggaatgatgttgccccggcagagggtcgagaagtctgaacgcatgtgcatacgctccctcgtcgttttcgtcaggtagaggaagcaggcgtgggtcaggaacggacgctcgttgaaatgccgctcgtaactgcgggagaggaaactcatgtccccctcgcccgtggccgggcggtaacgctcgcggatgaaccagtcctgcttgtgtaccacgctgtattcgggcaagaccttcagggccttgcaccaggcggcgtggatcgcctcgtactcggcggacgtgacggtgaacagctccgggagttcgacccgatagacgaccgttatgtccgcgtccttgctgatgatacaaccgccttccacggccaggagcgggaacttgctttccagcgtggtggctttcaagaggtttctcatacgcggcccccctttcttttcagcaaccggcgcagggacttgcggttgagcaggtagcggggatgccggcgcgcggcgagcagcttcatcagcccgtgttccccgtaacgggtgttcaggcggaaggtaagccagaccagcaccgaagccgccgcaacgccgaaagcgatacatacccactgatcgacccctgccatgtagaggatgacgaacaccacgaagacggccagcaggccgcccgcgaagatgaagaggtactgcgccttcaggccccggaactccacgctcttgccgattcccttgttgattccatattccataattatttgcatgacaggttggactacaagaagaaagagcgtaggatcgtcgcggcgacaatcaggaaaatacacgcgccgaaccagctcgcggcggtcttcgacgtgtcggggtcgccgctcgaaaacttgttatagaccttgatgcccccgataaggccgaccacagcccccacagcgtacacgagtttcgtgccggggtcgaagtagctggttaccatgttggtagcctccgtaatgccggcgatgccgttgccctgcgcgaaagcggaggagatggcggcaaagagaaatgccgccggaagaagaatcttgttctttctcataactcgataatgtttgaattgtggcgcggggatggataggccccgcaccgggttaaacttcttgattcgttttttttcagtggttcgaggatagcctcacgcgctacccgtagtctttttctttcatcgtgatgtcattatggggttaaacaaactcacggacgtcgaaacccgtgggaaccgaaccctgcggagatgggctttccgcagacctctcggacatacgccggtgaaaagccgagaggtaggtgtcgatcagggattttaccctgtcgttcccgtcggggcggcccgaaacgatgacctcgaacatgtcggtctgtttcaggcccaggaggacacgtcccgtttcctccctttgctcgtctgttgaaggtggatcgtgtaccacgtggcggtaggcttcgcccatctgttcaaaactaaccccctgggcaagcgagcggcccaaaaggggcagctcttcggtgtcgtcttcatcctcgtcataatccggctcctccgcgtccgcatccgggaaagattcatcgtacagcggaaagtcgatttccagaggttcgttaggctcccccacgggagcgacaccgaacacttcatccaggtcttccggcggaatctgccgggggtgttcgggtacattcgtgggcacaaatatatcggctttttccgtaactttttcagtttcagattctacggcagcttgtggccgggagtggcgcaagtcgaggacaaagcggctcctgccgatgatctcctgccggcagggcgtgtcttcggaaacgatcccgtctgccggttcgttacgttccatccgccgcaggcggaaaaacgcccacaaggcataccccacggcaaagaggggcagcagccacaacgccccgttcatcgctcctccgctttgggttgccgggaggccacggcctcacgctcctcgaaaagccgctcgatggtttcccggttatcgtccaggtgcgccttgagaaccttgtccacgtaggccgtgatcgtcacgtcgccacgaccgatgacacgggtgatctcgcggatacgctcgtgatacgacggacgtatcttcacgtgcttgttaccggcgaaaggcagccgcagcaggcagatgtaacgggccaggtactcggcctcgggggtggggacagtccccacggcgacctcccccgaagggccgtcggggacgataagggttttcatcctgcgccggtagcggcacacgcggaagatgaagggcacggcgacgcaaaggacagccgccaggataacagataaaataattgctttgtctgacatgatggattgtttttaatggattgtaaaaaatattgggttcataactaaaaaatatcggagttccgtttcttgtagagttccgaaatttcctcctgataggtcgcgaaatgctgctccagcacattgtccaggtagctatacagcgagagttcgttcttaccgataacctgcactatccgggttatacgctcgtgaaactccttgcggatatacaccgttttgccgcttcgggtattggaggaggcgttccggataaaaagacgctcgtaatcctggcctttccctcttcggcggcgtccctcctctttcgtagccggcgaggaggcggcctcgccggacggttccgatagagccgatgcctcctcctctttttccggcgtgtaaggatgcaatggccggtttcggcttttggcctggctgatgatgaaggaagcgtccaaaccgtcgtcatgttcttttccgctcataagatcctactttaacagttcgatcaattcatccacgagtttatccaggttgctgccccggatcaaagaacggtctgccgggaagagcgtggagcggaagacagagcgacggctggcgttctgctcacgacgaaaacgcttggtgtcaggcaagaaggtcttcaggacaggaagagccaactctttcattaccgcctcgtaaacctgatataactctgtcttttcacgtccgtccaccatgttccatagcatatacagccctttcatccgggacttctcgcggcccatgatatgctcctttaccacaaccgcgtaattcagggtgctttccatgacaacccggtcggcactgatcggggcgacgagataatccattccggccagggaatgaatcagatcctcgttattgatcgtaccgggaaggtcgaagaacacataatcgaaatcaccttgcggcaggaggtagtcggcatcggccaacgcctctttcgtgttgctttccacgacaggataggctttcttttgaagccgggtgaattgttcgtaagctaacctcttgtaatgttcgtcttcgagggcaagcttcaggtcacgttcccgcatctccacgatggagtgttggggataatcgcagtcaatgaccgcgacattgaaaccctttacatagtgcaggtaagaggctgccagcaccgtgagggtggttttgcccgctccgcctttctgggtggagaaggccacgaatttcgttttctctttcattgttccatgcgtttttagttatacaatcgggtaatcgttcatctcttcacgtatccgggcaagtgacggcatgagattttatgcaggtatgccggcacgcatatatgctggtgcgctggcaggctgttacgccggtatgccggtgcatgggcgcgtgtccgattttatactcatgcgcaaccgcatttgcttatccggacaaagccccgctttttcctctgcacacggtgttttctgcatccgtccgcacgtgtgcggacagggggatgtgtcattgcccgtatccgttctcacgtgcaaaataaacccttaaaaacacgggttgtatgctctttttccgctatggccgcgtgtggcgtcaaagtggacgcaagtggcgtaatcgcttatggcacaagtgattgaataggtcggtatctttgcctcgtgaacgatcccgacgctaatgaagccgtccttgccccgttttacggcggctctttcaatgttctgtctgcgagcgggcagaaggtatttgcaaagggcaaatagcaagctgtgttttctgctgcacgattctcgttttgcagcagaaaacagcttgcccgcaagggggagaaagcacctccggagtcggtgcttttcagaaaggcggcaagccgcgaagggatcggaattttcaggaaccgggaggctctggcctctccttaaaatttcgatgcgatggaaaagaacagaaagccccgagggggcaaagggggacgacccgcgaaaaacgacccggccgtttaccgcttttcggtaaacttttcagccgtggaacatgcccgtttcctcgacctttacgagcagtccgggctattgtccaaagccgcttttatcaaagcgagagtgttcaacgaggcgttccgggtggtaaagaccgaccggggaacgctcgaatacgtggcgaagctgaccgctttccacgcccaattccgtgccataggaacgaattataaccaggtggtgaaggagctgcacgcgcatttttccgagaagaaaacactcgcgctgctctataaactggagagagcgacacgtgaactggcggccgtcgggcagcaggtcgtgtcgctctccgaagagttcaaacaacgatggtagccaatatcaccaccggaaaagacgtgtacggcgcgctggcgtacaaccaggagaaagtcaatcggggcgacgggaaggtactgctgacccacatcgtgagggagccggtggatgggcgcttcaacgtggccgcgacggcagaagacctcctgcgctggatgccctcgcactaccggacggaaaaacccgtcgtgcacgtgtcgctcaacccggctcccgaagaccgcctcgacgacgggcaactcgcggagatagccggggcctacatggagcgcatgggctggggaggacaaccttatatcgtattcaagcataccgacatcggacgggagcatatccatatcgtgtcggtgcaggtggcccaggacgggcgcaagataaacgacagcaggcgcaacgaacgcagcgtggccgttaccgaggaactggaacgggagtacggactgcatcccgccaaagggagaaagcgggagaaagggcaagggatcgtccccgccgattacacgcggggcgacctgaaacgccaggtggcagcggtaataaaaccggccgtggcgacataccgcttccagaccctcggcgagttccgggcattgctgtccctatataatataggtatagaggaagtccggggagagcggaacggaaccccctaccggggattgctctacacgctgctggacgagaacggggacaaggcagtggccgcgccgctcaaatcctcactgttcggtaaagaggtcgggtatgacgggctggaacggcacatggagcgcagcgccgaacggttcgggaaggacgacacgaggaggcaaatccgtggccgggtcgataaagcgcttcggggagaacccacggaggaagaactgcgcgaacgcctgcggggagcccgggtggaactctacatacgacgcaacgaaaacggccgcatcgtgggtgtgaccttcattgaccacgaaacacggacggtcgtgaacggatcacggctgggaaaggcatactcggccaacgccttcgagctgcgcttcggcggaaaacggaatcccggggaaaacacgaggggcttgtccccgaaacaagcgcctgccggacgggacgggcaacggaagcggaatacctcacgacggaggaaagtataacatctcaattatcattcatttattaaatcttacggttatgcaacaggaagacgaccttcggggtcttgcaaaaacaatggatttcatgcgggcattgagtatcttgttcgtggttatcaacatctactggttctgctacgggcagatacgggaatggggaatcaatatcggcgtggtcgataggattctgctgaacttcgaccgcaccgcggggctgttccggaatatactatggacgaaacttttcgccgtcgtgttcctcgccctttcatgcctcgggacaaaaggagtaaaagaggagaaaattacctggcggaaaatcacggcatcgctggccacgggaggcgtgctgttcttcttcaactggtggctgctggacttgccgctgacggcaacggcgaacgcggctttctacatactgaccctatcggccgggtatatctgcctcttgatgggcggcgtgtggatgtcccgcctgctgaagaacaatctcatggatgaccctttcaacaacgagaacgaatcattccagcaggaaacacgcctgatcgagaacgagtactccataaatctgccgacgaaattttactataacaaacagtggaacaacgggttcgccaacgtcgtaaacccgcaaagggcttgcatctgcatgggaagcccgggcagcgggaagagttattgtgttgtaaaccagtttattaaacagcaaatcgaaaagggctatacccaatacatctatgactacaagtttcccgatctttcggaaatcgcctacaaccacctgctgaatcaccagaaaggttacaagaaaatcccgactttctacgtcataaatttcgacgacccgcgccgctcgcaccgctgtaaccccattcacccggacttcatgaccgatatttcggacgcctacgagagcgcctataccatcatgctcaacctgaaccgaagttgggtgcagaagcagggcgatttttttgtggaaagccccattatccttttcgcggccgtgatctggttcctgcgcatctacgacaacgggcggtattgtaccttcccgcacgccatcgagttcctgaacaagcggtacgaggatattttcccgattctgacatcctacccggaactcgaaaactacctcagcccctttatggatgcctggctcggaggcgctcaagaccagctccagggccagatagcatcggccaaaattccgctttcccgcatgatttcgccccagctatattgggtcatgtcgggcgatgacttcacgctcgacatcaataacccggacgatcccaagatactctgcgtggggaacaatcccgacaggcaaaacatttacggagcggctttgggattgtataattcccggattgtcaagctcataaataagaaaggccagctcaaatcgggcatcatcatcgacgagctgccgacaatctacttcaagggactcgacaacctgatcgccacggccagaagcaacaaggtcgccgtgctgctgtgcttccaggatttttcacagttgaagagggactacggggacaaggaggccgccgtcgtgatgaacacggtgggcaacatcttctccgggcaggtcgtaggtgaaacggccaaaacactctcggaacggttcggtaaggtattgcagaagcggcagagcatgacgttgagccgcagcgacaaatcgacatccatatccacgcagctggacagcctgatcccggcctcgaagatctcgacgctcacgcagggaatgttcgtcggggccgtggcggacaatttcgacgaacgtatcgagcagaagattttccactgcgagattgtcgtggacaacgaaaaagtgaaagcggaaacggcccggtacaagaagataccacaaattaccgacttcacggatgagaatgggacggatcacatgaaacaggtcgtgcaggaaaactacgaacgtatcaaggcagaggccgaccgcatcgtcgccgaggagctggaacgtatcaagaacgacccggtgctttgcaagctcctgccggaacagaactaaatgaacacaaacaccccgcaaacaccctccgttaccttaacgggggctgtttcctggttttataaccgcacagctggtgttttggagcataaagtagtgattatgtgaacggaaaacattatttttgtgttcggaatccttttaattataagtatgacagttaccgatatatacgaagcaatgaacagcaaggcggaaacgtttttcgagtggttgcaggctcacccgcaatacgggttgctgtttggtgtcgggttgcttgccctatggcttgcagggttgctgttccgttggaaatgggcgtgtcattggcagtttaacagcaaactgtggttatttgacgattgcaagcctgaaacacgccgcagggttcagattgtgttggtcagcgttctgattatacttatattggttggtttctttgtatggagataacggtatggaaaaggacaatcgcaaataccggatctgcttcatcgactatatgtggtatgtagccgagatatggcacgaaagggagcgtaccaatctcaacggacgtatgctactgttttggtgctggctcttcgtcctactcataccgcttgggtttccaccgatattgcgccttttcggctggatgattggtttggccatagtgattcctctctgctttcttcccgatttattctgcaagctacgctatacagccggacggcgtgaagcgctccgtgaacattacgggaagatgaaacatcccggcaggaagctcgccaaaatagttcttatcgctatcgccctgatcgtggcaaatgtagcgctgatgttccacctcggatttatacattgggcatgatgaaacggcaggagaataagcaacggttttatctctgggattacctctggtggatgggggagaaatggaagcaggcaagacgaacaggcagggtcgatggcgaaatgatgctctcgatttatatcttcgctcttttgatattccctatgatgactgttactatccggctttttccaggtgtgtcggcattgttgccatgtgtcgtttttagcattgtcacatttgccgttatgtcgctcgtcagcaggatttacaaatggcgaggcaaagcagtgatgtctcactatgccaagtgcaggtttaacgaactccttgcggttctgttatttttccttgcgatggccattatctgctttatgatgtatcttcttgacaaaaagtgatacatactttgatacggactccgggccgttatatcgaatggtctaactcgatgtaccagtttcccttgatgggcttgtaaagcgtggtgtcgttgtacgtcctgcggtagatctcgttcaggtcgccatgttcggtgatacggatattccgacggcttctcaatccgggatcgtaaacgaaactcttggacgttccggcatccacgatgccgtgggagtagtacggcataacgaggctcacatataccgaatctgccgttccccattccctgcgatcaacaaggataaaaccgcatccaatctctgataacagggagtcgagtaggattcgctccggcttcaacagtccatataccgggatgtcttgttcatcattcgtttcatgggatgtatcgctttgctccattgaatcaagtataataacctcttccggagaaagcggcgggtagtgaaaactaccttctgaactctctgccatgatttcgtacaccttacggaacgccacctcgtgcgtggtgaaatggcgtatcatttcctcgtccgacggcggcatgggaggctctccgcagcttacggcaagcaggattacaaataacaggattatgactggtgttctcattttctaatgtttaatgttctgtggctaaccaatcttgtttagggagttgagccatttgttaatagcatccaatctgttattctgtttaatggtatcttcatttctacataatttgatttgccgaataacagagttctgcataattgaatcggatttgaaaagcagttctaaaacggcttcataacatttggaatatctggacaattcatccaatatatttgcgtcttttagaatatacaggttgaaattgtacacaaatgacttgtaactgaaaatctccgactgtaatgctgctgcatcaagacaagtataaaacaattccttatcgtgctgatatagccacatataatcagatgggttcaggttgtagtgcaataaagtttccgaacggacaaatggaagccccgtatttgagcctaccagataacggtatgtctcattgactattgactcaactatttcaatggattctgattgtttgtccgattcccgtatttctgtaaatgtatcggcaataagaacttccacatcctgcgatttgtaatatataccgtttttttgccagcggaatctacggatatattcttcagaagtcggacaacagaacagtaaagtatttaacaatcggttcagatatattcgcttatctggaatatgacaacggtgtaaccctattatggagccataagcgtatagctttccaaactcgttttcctccgaatttgaatttttaggcatgtaatacaaccgcacaatattgtcaatgaaataatatatatcaagatatttcaatgtatcagccgattctccatatttgttaagtaaatgccgctccagtttctcgccataccataagtagccatcgggatttatttgaaacaaccgatgaaacttaggtcttgataatgaaaagttcttgtttctacttttcattcgttccagtaaggcgacaataattctattcgttatatccatagctgtaatgtttagcggacaatcaatctttcagagagatttatctgcttgttataaacctatttgaaatttgtcagtatatcattctttttattggaagacaacatttccaataaatgattgaagctatcgcaaacaaattctgccgaatcttcaaattcaggttcaactccataatagattttaccgtaattttccggagataaatctatgcacaaatattggtatccgtcttttactgacataagaataggaatatggctatcccaaaacaggcgaatcatatcgcaggattccttatcatctgccaacgcctcaagtcccatcagctcaaattcattccaacggaatccgctatcgctttctccgttaaagtcctctatggaattaaaccatacattatcactttcattcgtgattgtctgaaaccgttgtaaaaactcctgatagtccgcaggaagttcggaataccgattttgtaaatcagagcttaattcttttctttccaatcgttctgtaacgacgaatcctatatttttcagtgcttcaatcatatttttattttacgagtttataatggcttggtgagggacagcgtttagctgttatatcgaccttgttagtaatatatttcacagagaataaatgtaacataactcccaaattatgtcaatagtggaatttagcccaagtttatcaaagaacattttcatttcccctgataggttattattgaaaatattttcgataataacccggcagttttttttactgtttagtatcttcttattgtaattagcctgttccaagaccatcttataaaacggcatgagatataaggtaaacacctcatatcgcccattatgaaaagaaggtgtcttcatttctttttgagacacattaattaaattaaccaaactgccactttcaataatattgactattttactttcgcattctttgaaaaaagtttcatcgcaggtttggttatatccaatctggatcttaatgtttgctgacagattttcaagcccatcatccggacgatcaatgacaccaacccacattgttacttctaatgagccattatgtttatatactcgtgctattatataacaataatatatatcaatgatatgtttacttaaacatataagatcatcataccataatttcttagggcacttaaagttatactcattgagtaaacgttgaaattcatttataacactgtgaaattcagatttcatatttattactaatggttggtggctaaccgacctttttctggggaggtttagccgcatgttaatcgtctttattggattgaatgtattattaaagatacttcgtctttttggtaatgataagtttttattatacaagatgttttttgtagtgataaaaacactttaaccgatgcttcacaatagggagacaaagaatcaaataggactaattcagtagaatcccattttacttcaacttcttctatcggttctgctccagttactatatcattctccagaagtttttccaccgttagataatcgggagcatacttccaacgaattattaagattgctccatctttatttactatgcgtgtagccatcggttcatctcccattaccaataggacatgattgtctatatagattttccccaagtaatctgttacgctacatatagcattgtagtcttcttgaccgttccattgatgggcatattgttgctcaacaatgacaaatgggcttccttctgttgcaatccaattattcatattttttctcagcgattaatggtttgcagcgttccgcttattcggtcggtttgctgcttgttactaacgctttattttttattccaatactcttgcatccaactttcatattccaaaggatatatttcattggcagaatttagtttatcattgatattcaattttcgtttggatttagcggattctgttttcagcagggaaagtccttctattaactttctcgcatcatctttcaaacgaaaccacctttgccaatcgttttttgtcatttccgcttctcgttgcttctgatattctttacgtttagccgtctgttctaattgaagtaagagattttcatctgcaacaaatattgggacttcttggaaaataagcagatcagaataatgtttagataaaacgtctttagccttttcactgacataaatttcagagcagaagtcgcaaaaaatcctatcaatgaaaatatccaatcctgaaaggctttgttctactaacttggcagaaccacgttcttgctcgcaataaagcagtccgtccttttgaggtatcaacgcaaataaattccctatttgctccgctaccgtttcgttatgtttgcgccgtgtaatatattcttccgcatccatacttccagacggatatatcaaaggctccggtgattgtaaatcccagttctcccaatccaattttacaatcttttccttgtttaccggttgaaggacaaagcctgtaagatttgattctataatatactgtaaaacatcctccttgacaattaacacaggactttctctgttatattgagagcggtagatagaagggcaaaacgctccggttctaaaaatcatgtgggagtttgtatctttatcataacagtaaataccttgccacagcatttctccataacttccccaaggcattattctattttttacagtataatatttcatctttctttattttatgcgttagtaatgttagcggggaacgctgttaggcgttatcacgctttgttagctacctcttttgtattttccaattcttcaatggttctcaaacacattcctttaatgcttttgtttgaggatttctgatagactaaacgtaaactgtttagaatatctattcgttgattatttgtcatagtaccaccaaagaaatgattgtcgccgttagcaactccggtgcaatgccgtcttattcccagtgtaatgtgacttatagtaagcaaatctcttttcttcaacattacattacagaatatgtcccatacatcattatcccccatatatccaattatagaacctgacatttggcggactatcgcacttgaatgatgtgcatattgttttgcaatctcataagctcgttgcttaaactccacacaagaggattcttttgcaaaatctttagcataacagccgtgatctatatatctttcacacaccataagcaatattaataaatactcccaaagtaacttttcttctgtttcttgatgtaaaacccgaattaacttttctcgattctccgaagataaaaaccaagtttgtacacttaacgtatcacacgtttttccgaacagctcactacgagatgccatagatataaagtttatacatttttttcgttgtactacattttcagattgtagctcttccagtgcgacatccaatgtttctttggtgtacttatactttctcattttaattcaattttacatggtagctaatgggttgcagcttgccgccgttaaggcggaacaggtgcttgttatacacatttttatacatagtaataataccaattactattaaaattggtatcaaaattttctttactatccaactttacatggaaattttcttttgtgaaaaatccaaattcatcatagcgattcaacaaacctaaatacatttccgaccatatatctataaatcctctttctttatattgtcttacttgcttatcctcatacaagaaaaaaacaacattagccaaacagcgagaaatatcccataaatcattacaatgtaatttttcttttaattccaatatttcaagttgagtaatgctattattagcttcctcttttgctaatgtttcaaatgcttgataggatagataaatgctatcggctttattttctatattcgcaatttgtttgaatttattcaatatcgtatttctttttcgagaatcgacaacaaaccgtcctttataaaaataatttacttcattttcatatttgaaccaaagagtaagattaatagaatcttccccttttgcacatatcacattgattacttgtacagaaaatcgttcctgtataaaatcggcaagttgagcatattctttattcatgctttcttgtccgagtagaactcttttggtttgttgaaaatcgttatctgtcatttctttatgtgtataatggcttggaaaggaacgccgtttaggagttagctttccttgttatcaattttatattcttcatattcaagaaacgcagtatcaatatctccttctaataggtagtagaaacaatcttgtatcatatcaacccattctatgatttgcttttgctgctcttgtgtaacaaaatcagttccgtcaatccacctcctgcctaaatgtattatgctatatacatcacttagtagggtttgattgatcgttggcttcataaaatcatctgcaagaactttaagacattccattatctcgataaaattacactcatatatttttccttgaaatggacgaagtgaaccaagaaatccattttcccatttcttattttctatatcattgtttctacaagaatggaaacttaataaaatatatgcttcttcttttgtcattgcgtttctgtttaattattgataatgttcggcggataatcgacctttaagggagattaatccgcatgttaccagcattattcttctaaagattccaaagattcttcttgaaacattccattttcatctctgccgtatgcggtaccgtatggagcgtgaagaagcggtataatatctggcgagtaattacaaattgtatttagactataaatgtctaaattttcaggattatttgcatactcatcatcctcatcaccagcaaaaaatctccatccgctgtcatactcgccaaaaggactttcaccatctgggatttctcgatacatatatcctacgggaagaccatcgactgttattctatcgcttgcaaaacatcctcctgcttcattccaatctgtaaggagatcttttatgttatttgctggtataaaaaatttcttttcctttttcattttatttttcttttttgctggtaatgggtttgcaactaactacatttagcagtttaggtggttgttatcagccttttcagttaagaattgctcaaataagataaagaacttatctaaagccttgctttcatcgttggcagacatccaatatagaaattcacaccaactacaagtacgttcactactattaaagaacgaagtatctatccatagactaaagtcgttcaatatttgcatttgaacatcttcatccatattgcgagagtgccaaccatctataaaggctttcaaacagaatatgctatgtcttcctatatgcattgcaggtctgtcttttatcattcttattagttcaatcacgttcatgttcttaacttacgatagctgataatgtttggcagcgttccgcttattcagtcggtttgctgttcgttatctgactccttaatatatttataccagtcacttttcgatatttcttcaaaagttggtggtacaaattgtccgaatgcaccaaaaggcaaacaagattcttctttaatgccttttgccgggtcattccattccgtttcgcattctgtacaataggcgtatagttgagatgtttgtttatcttttactatcacaacccacccttgctcacaaagaggacaccaagctattttatacatacccttttatattatattcagataatgtccggcagcgttccgcttattcagtcggtttgctgtttgttagcagtctcattcacaatcttcataacgactatatttcttaatccatccgtttgacgaatatagttcgcctgacaagccatcagaaatattggctatcgaatctatctcttcgtctggatttgaaatttgccagccatcaagttcttgctcaaagaggaaaagtgtattatgcaaagttgcatcaaccatccgtgtcgcaatcctctgaattagttttatggtatcggtagtaagagatagactttttagttcctcattcaatttttttattgatgaagcttttgcacctccattaaggatattatcaagagtgtgtaaactattatctctcacactctctatatacatttttccaaattgatttaatacttcttcgttttccatttcttcctttttttattgactgctaatgtttggcagcgttccgctttttagtcggtttgctgtttgttagtcgcttattcccattcaaatgttgataagtaacgaagaccattatagtccgcaatctcttcaacatattttttaggtatgccaagatgacctttcatgttttctttaagaataaaaactttttggtttttctttttatctctaaaaccattcgggatatagcagaaagtacaattatttgaggcattattaaggccatttctatttaatgatttttcaacccaacaatcaagtacattattgtctattataactgattgaattaattgaacagaattcattgtacatgttttgtcaattttaattcttaaaaactctggataatagaattttatacctaagtctttacagaactgacaacgatgttcgggattgggacgctttttgctctgaccggattcatacgcttccaactccttgaggtattgctcttgattaaaatactccataaattcggtttcatttttatcggtatgcccaatccatgtcatatatttcaaaccggcagtcgaggctgttgtaccagtcggattaagttcaaaaataaaagagcccaagaaggataccgatacggtattcgtcgctttctgcaatgatataccctcatggctattatacatgattgccgcatttgcgacagttatttttttcgctcttagtatttccttgattttatctgtgtctgccggaataacattcaacagattctcaagtccttcagaagaatatttcataataagagaatcttcgtcatagtccattacaccaagctctttacagaactggcaacgaagttccttattgtcttcatcgtattctttccaccattgacggaaagccgattgatccatatatttctcaaagtcagcttcggaatcgaattgaccgacccatatcattatcttgctcattttctttttttatttttcaagcgactaatgttcggtggataatcgaccattaaggaagattgatccacttgttagctgcacttattccaatttataaataagcccttttattgtacttgcaatcaatatttctttatcatcaggagagaatgaaatattaccatagccgatatttgataattcagccaatatttccatattagggaacgtacaaagttttagattatcttcttgatataaggcaatcatcttgttgttatgcgaaagttgtatatccaaacagccttgttggtgtttaattggcagttctatatttaagggcaaaatgcgaaaagcaagattgccttctttcgcaaagtataacacttgctctaaatattcactatacagaaaatttgcatcgtccaaatcgcagaatgtttgttcaaatgttctgttgttcatatcaaaccaaagatagaagtaccgattcttttcacttgtcccttcttccggtctgcgaaacccgtcaatgaagtataattggcgtgaagggatataacatatatgttcatacacttctctcatatcttcacggaatctcgtttcctttccgttttcaatatcataaactgatatatagccgtatggaaaatcataccccaaattaatgacatacttgttatcatgtgaaatacaagcgtcaccatcaccatttgaactgcctattttcggtttaagtttgcaacggattgacatggttgctaaatcatacacaacaagtttgcggtcattatttttagccaagagcaagttgctgtcgtctgaaaagaaaacagatgcatcgcctacttctttgaactgtgctaaatgccgatatgtttcattttcaaagatgtttatctgactactattaacttgtgcaatcaaatgtttgtcgtctgacatctttagaaaatatgacttcttaaaagtttgtatcagttccatactcattatttttttaatttgcagctaacgttatactatcagccgatttggctgttattttctttaagtatcagacctcgtcttcctccatcaacagatcgtccaacgggcttttgatattgcttttgaaagtgtcggctatgtggacatacctttctgtcgtcttgatattgttatgtcccataagctctttcactatcttgatgtcggttccctgctccagcaggtgagtggcgaacgaatggcgtagcaggtgcgggtaaatccgtttcgtgattcccgcttcccgagccgcagccttcaaccgtttcgacacgatactctcggtgaaaggttcgcccggtctgtgttcaaagagccacactttcggtttgtatagtctgttatattccgtcagctttttcatcaacggttttgacagcagggtgtagcggtctttttttcctttaccctgccgcacccgtatcagggagcgggattcgttgatgtcgccgggtttcagttccagcagttcgctgatgcgcaatcctgcggaatagagtatggagaacatgcagaagaaacgcaggtctgtcaccgtcacattgagtattttctttatttcctccttgctcaacacgtcgggcagcgtcttctcccgtttggcacggttcaccttgtaacaccgccgttcctgaccgagaactttctcgtaatagaacttgatggcgttgatacgctggttttgctggcaggaggatatgtttttctcgtggatgagatacagcaggtagtcgtttatctcgccgggagtaaccgtttcaatcttacgcccctcgaaatgctgttggaaatcgcggaaataggaggtatatacccttacggtatggtcactgtaacgcacttgctgaagtttttccagatagccttccggcagtggcggccgtttgtcttcctctttacggggtgcggtttccttgatggcggaatagtctataaatgccatttttacatagcggtcgaagaactcggcaagcacgaaatcttctgccggcagataagccctgccgccgacaagcagtacgttttcttccttcgacagcgacaagcggatgtcattgtcattaccgaaagtcacttcgacaaattctttcccgtttcttatcaccggagaaagtttgatcttggtttttggggtatatatttccatgcctcacgttttgtcggatattgaaacccgttttcgcaaatttataaaaaaacacgggttatccatgcgctttattgacatttaacaatagatcccgactacctgacaaataaggtgaggagccacgaaaataccctctgccaaatccgtccttcccggcactccgtttctccgatttcctctgccctgcgccacaagcggccacttctgtgcccgatgcttccatagcctttccaactcttttacgttcagccggttccccttactttcgttcccgcatcgctattggtgctaactaaaaacactcgtaattatggacgaaaacgtaaagaacgacgctaaacaagtcatgctcgttcagaatgccgacgacggacgactgcaagccgttaccggcgtggatcgggacggcaatatccagaccgccgaccccacggatcagaacgtggcgagcctgctgaacgtgaacacgcaggattcagccctcgaagccttcttcaaaaagttcatggaacaggcccagaaccccgtccacacgggtatcttcgtcatgacggagaatgccctgaacaaacttatccgcatcgacttcgacccggagattctggaaaattaccgtatcgacccctccgaacggctccagacgcaggagcagcggcagttcgagccgctggacgtcacgaagatagacctggcggatatggagaagaaaggtatccgcatggaggacatcgagccgcacctgaaagccatgtcttacggacataaatccaacgggctggtggagatgaaccccgaactggagaacgggatgcgtgtttccaccaaagggcgcgtgtcgctcgaagagcaggcggacggctcgctgcgcgtcgtgcggcattactggcaggaacggcccgacctcgacgcccccttccacggggtgctgctcgacgaggaggcgaaaacgaacctgatgaacacccgtcatgccgggaaagtgatcgacctggagctggagccgggcaagctcacgccctgctacgtgtcgatagacaaatggacgaacacgctggaacccatgcccgtttcgctactcgaaaaacgtgcccgtatcaaggaggccgacctctcggaaggcaagcagatggatttctacggcggcggcaaggtgttgctcgaaggatataccacccgcgcgggttataaacgggatgcctatatccaaatcgacgcggccgaacgtaactattcctttacctacgacggtttggatcgcaaccgctacgcccaggagaacaaggagatttaccgccagaaggccgccgagaaaaacggacggcaggaaactacggcctccgaacgacagcccacgctcacgattcaccggacaatcctcaaagcctccgtgcccaaagaggcttatgaccaatggacggaagcggtgaatgatccctccaagcgggcggatgtcaaggctttctacatcaagggcatggtcaaggacgggcagggtgagccgttcaacgcctgggtcaagcccaacttcgagcgtaacaagatggacttcttccgctggaatcccgaccgtgcgaaacggcagggggcggaggtcaaacccgccattgaaagccgtacccaggtcgccgtcaattccgagggcaagaccgttgaagcggtcaaaggtgtgaaagagccgctcaagcagggacagcaggaggccaccccgacgcagaagaaaaattaccgcagcagcaaaaagagcaactccaaaggtgtcaaggtataacgtatgaaatggttctacatgcaggccggagccatgccgctcctgatcgcggcgctggccgccttgtacctccggccgggtaaacgcagccccccggaggaggcggacgacggacggctgtattacgacgggaacggcaaccatgtctattacgaccgccggctgatcgcccgtccggaaaaagagaaagaagaagaacaacaagaaaacaaccactgaaaaatccgaatcatcatgcaagtaattatcgcagaaaagccctcggtggcgcgtgagatcgccgccatcgtgggagccacgaaccgtaaagacggttttatcgagggaaacggctacgccgtaacctgggccttcggccacctggtcgggctggcaatgccccaacagtatggcatcgcgggtttccgccgggaaaaccttcctatcctgccatcatcgttcatcctcctgccccggcaggttcgggagggtaaagagtataaggccgacccgggtgtcgtgaagcagctcggtattctccgggaattgttcggcatggccgagcgcatcatcgtcgcgaccgacgcggggcgtgaaggggagctgatcttccgctacatctactcttacctggaatgccgcacccctttcgtgcggttatggatcagcagcctgaccgaccgggccatccgcgaggggttacaacacctccgccccggcaacgaatacgacaacctctacctctcggccaaagcccgcagcgaagccgactggatcgtcggtatcaacgcctcgcaagcgcttgccgtggctgccgggcggggcgtctggtcactcggacgggtgcagacccccacgctggcgatcatctgctcccgttacctggagaacaaggcgttcaagcccgccacctatttccggctgaagcactccacggcaaaggagggcacggagttcaccgtcctctccacggagaaattcgacggcagggagaaggcggaagcagcccgcgccgaggttatcggcgcccgaacggtacgcatcgtgaacgtggagcgcaaggaggccagggaacagccgcctctcttgtacgacctgacgacactccagaaagaggccaacagccggtatggtttttcggcagaaaaaacgctcgacatcgcccagtcgctttacgagaagaagttcatcacttatccccgtaccggctcacgctatatatcggaagatgtggccgaggagattccggcactcatcgggaacatgacacgctatccccgtttcgcggaatacgcgggcctgatggataccgcatctctctcccgccgaagcgtggacaacgaaaagatcgccgaccaccacgcgctgcttcccaccgagaacctcccttccgaactggatgccgaccaccgcatcgtctatgagatggtcgcggggcggatgctcgaaaccttttccggggcctgcgtgaaagaaaacacttcccttaccctgcaaagcgcggggcatgatttcacggcccgcggcagtatcatggtcgagacgggctggcgggccgtcctgaatgaacctgtcgaggagaaagaggaggacatgaccccccttcccgacatcgtgcaaggcgacgagctgcccgtcaaaggatgcggcacggaacagaaacagacccggccgcgcccccttcacacggaatcgagcctgctggcggcgatggaaaccgccggacgcgaactgtccgacgaggccgaacgcgaggcgatgaaggatgccggcatcggcacgcccgccacccgtgccgccatcatcgaaacgctctttgcccgcgagtatgtcaggcgagagaaaaagtcgcttgtacccacggacaagggactggccgtgtatgccgtggtcaaggacaagaagatcgccgatgtcgccatgacgggcggctgggaactggccctctcgaagatcgccaccggggagatggacgccccgacgttccatcgcggtatcgaggtcttcgcctcgcaaatcgccaaagaactgctggaagcaagaatcgacggcgcggagagtgacacagcctgcccgcgttgcggcaggcccgtggtgttctatcccaaactcgccaagtgccagaatcccgattgcggcctgaccgtatggagaaccgtggcccgcaaggagctgaccgacaagcagcttgcggaactgctgaccaaaggcaaaaccggcacgatccggggattcgtcaaaaacggcggcgggacgttcgacgcggccctcacgctcgatgaccagttcaagacctcgttcgttttcgaaccgcgcgatactcccaggcagggaaagaggaacaaacggaaataatcgttacctttgccactggaaaagacctgtcataacgagatacgcttgtttgataaggattttttcagtggtcggcgcttcgggtgggaacccggggcgcctttctcttccccgattatcaacgaccactaaaaattcttatcatgccagacaagcaacaccatacccccacgggggaattgtcctattacggactttcgttactatcctacctcaaggacagccacccggaactcatcgccgaaagtgagttcatcgccgagcgggccgacagcgccgcccaagcgtacagcgaggcgatccgttcgggctgcaaccacatcgaagccgaagaaattgcccgcgaggaactctgccgcggactgcacttttcaccctacaacacgctggtaaacatcctctggagggaattcgaggcggagattcccgaggataccgcccggcaggcggctctacgcctgctgcccctctgccgcggggtgctggagaagtacgacctcacggacgacttcgccgacacgcccgactacgaactgttctataccgaactgacgggaaccgtccaaatacttctcgaagatggcattcaataagaaaacccacctccgccagaatatcgacgcgctgaagacggccttcacgctcgacagggaacggcgggcgccgactcccgaagaagaaaggacactcggcgcatacagcggcttcggcgccatcaaggaagtgctggaaaaccccaccgggaaaccggacaaggacggcatggcaacgctcgtggccgagttgcacgaggtcatcagggcgaatacttccgacgaacgggaatacaagcgctacatggacgggatcaagaactccgtcctgacggctttttacacgcccccgaaagtggcagacgccatcgtggaggcgatatgggatacgcggatcgccccccaacgtattcttgaccccagtgcgggaacgggggttttcgtcaatgccgtggatttccacgacccctatgcggagatcacctgcttcgagaaagaccccgccacggggttgatcctgaagcacctgcaccccgaaaaacgggtgcgggtacagggattcgagcgcatcgaacctaaatacgccggttactacgacgtggccgtgagcaacatccctttcggggacgtggcgctcttcgacccgttcttctccacccataccgaccccgtgcggcggcaaggcacacgggcgctacacaactattttttcatgaagtccgtcgatatggtacgcgagggcggcctggtggcattcatcacctcgcagggagtattgaacgccgagcagggacgccccgtgcgcgagtggctgatgaaccgctgcgagcccgtatcggccatccggctgccgaacaacctctttacagaacacgcggggacggaggtcggcagcgacctggttatcctgcaaaagaaagccgccacgggggaactgtccgaacggcagcaggatttcatcgaatcccgcaagctgtcgaacggcatccggataaacaaccttttccagtcgttcgacagggtgatccataccgaggccaaagtaggcaaagacccctacggcaaaccggcgatggagttcacccacgcggagggcgtggacggcatcgaccgggagatgcggcgtatgctctcggaggatttcaaccggcatttcaacgagagttattgcctgaaacatgctccggaacagacacccggtacaccggagcgggaattgtcccgtccccgtcaggcggaacgccagcgtgccgaaagacacgagccccgccttgccggagaaatcgtcaaggagattatcgccgacgcccgtaaccttcagcagcagcgggaagaggaggaaaaacgccgcgtcgtcgcagaaatggcggcgcagggctaccatgtcgataccgaaaccggggagattacccgaatcgaaaacaaacccggacaagcgttaccggattctgccgccacacccgccggagaaccgaccggggaggatctggccgacttcggggcctggtcgaaggagcgggagaatcgcttgtgggagcaacacccgccaaaacccgaagatttcggcatgacggatacacccgtgcagcacgtgggcggaacaacggaaccgaaaccgcgggagggcttcgccgggtcgcttttcgacacggtggaaacggcggctcccgcacctgccacccaagctgccgaaccggtaaacgtgcagcaggaaccgttgctgacgctctacgatctgttcggcttcagcgccgaggagcggcggcaggcagaactcggtatatccaagaaaaggaacagccgccggggagcaaagcggaagacgccccgacaaccctcattattcgccccggcctcctctccggaggaacagaagagcgaaatgccgaaaacgacgccaccggagcgtgatcccgaagacttgtatgcctccctgaactgggaggacaacccgccgatcaacggcttttacgagatgatgatgtcgcttaccccggaacggagggcggaactacgccgacaaagcgcccggcagcaggaaaccccggaacagcgggaacggcaggcggtacgccccccgacggaagccccgaaagacagacgaaaacaagccgccggtacgccgagaacgggcagcttgttcgacacgccggaaaatccggaggaggaagaacccggtaaagaaacgccgcagatacgggaggcggatatgaaaccccgcccgttcgagggggaggtcgccccctatttccgcgaggggacactcgtcacggacggacaaaaccgggtcggctacctgcgggagattgaatccctgcaacccatgttccacccgctggaactcacgcctgcacaacggacgaaagcctccatgtatatcgagatacgcgatgcctattaccacctttataacaacgaggcggaaacgctgacggcgaaccccgccctgcgggagatgctcaaccggctttacgacaatttcaccgaacgcttcggacggctcaatgacaaacgtaacctcgacctgatcaagatggacgcgcgggggacggagattctatcgctggagcgttacatcgacggcaaggcacgcaaagccgacatcttcgagcgtcccgtggccttcaatcccgatgagatcacgcacgccgacgacgcttcggaggcccttgtggccagcctgaacaagtacggccgggtggaaccgcactacatggcctcactcacgggaactaccgtggagggaatactcggggaactgaaaggacgtatctattacaacccggaaacggacggctacgaggttgccgacaagttcatcgccggcaatgtcatcgggaaagccgaacggatcgaggcgttcctgcgggagaatcccgaccacgccccggcccgggaatcgctggaggctctgcgcgaggcgacgcccaaacccatcgctttcgacgacctggacttcaacctgggcgaacggtggattccaaaaggcgtttacgagcgtttcgcctcctcgctcttcgatacggaggtgaagatcaccttcgcctccaatctggacgagtacggcgtgaaggcggaaacgacgaacgtgaagatcacggagcagtatgccgtcagcgcgcagacccgtaagtacaacggcctgcaccttttgaaacacgccctgcaaaacacttcgcccgacatcaccaagaccgtcctcaaatgggtggacggcgaacggcgggaggtcaaagtgcgtgacggggaggccatacagctcgccaacagcaagatagacgagatccggggtgctttccccgaatggctgcgcgagcagtcgtccgacttcaaagaccgcctgacagacctctataaccgtactttcaactgttacgtgcgcccgaagtacgacgggacgcaccaggaattccccgacctcgacctcaaggggctgggaatcgacaaactgtatgacagccagaaggacgcgatatggatggacaaactgctcggcggcgggataatcgaccacgaggtgggcggcggaaagacccttatcatgtgctgcggggcctacgagaagaaacgcctcgggctggccaacaaacccatgattatcgggctgaaagccaacatccatgaaatagcccggacgttctgcaccgcttacccgatggccaaagtcctctacccgggcaaggaggatttcacgccccggaagcgtgagcgcatcttccgggagatacgcaacaacgactgggacgccgtgatcctctcgcacgaacagttcggcatgataccccagtccccggagatacagcaggagatattgcaggccgagctggactgcgtggaggagaacctcgaagtgctcaaagcacaaggcagggacgtttcccgcgccatgatgaaagggtgtcagaaacgcaaggccaacctggaagccaagttgcagaaggtggcgcacgcgctggaaacacgcaaggacgacgccgtggacttccgcctcatgggtatcgaccacctctacgtggacgagagccacaaattcaagaacctgactttcacgacccggcatgaccgggtggcgggcctcggaaatcccgaggggtcgcagcgggcgctcaacatgcttttcgcgctgcgtaccatacagcagcgcacgggccgcgacctgggggcgacgttcctctcgggaacgaccatctccaactcgctcacggaactgtacctgcttttcaagtacctgcgcccgaaggaactggagcgtcagaatatccgcaccttcgatgcctgggcggccatatttgccaagaaaaccatcgactacgagttttccgtgaccaacgaggtcgtgcagaaagaacggttccgatatttcatcaaggttcccgaactggccatgttctactccgagattacagattaccgctcggcggaggatatagggatcgaccgaccgcaaaagaacgagatattgcacaatatcccgccgacaccccagcagacggagttcatagaacggctggtgcagttcgccaaatcgggcgatgccacgctcctgggccgcctgccgctctcggagcgggaggaaaaggcgaaaatgctcattgccacagactacgcccgcaagatgtcgctcgatatgcgtatgatagaccccgaactatacagcgaccacgtggacaacaaggcgagccactgcgcccgtatgattgccggttactaccgccgtttcgaggcgtacaaaggtacgcagttcgtattctccgacctgggaacctacaaacccggagcggggtggaacgtctattccgagatacggcgtaaactcgcggaggattacggcataccccaaagcgaggtgcggttcatccaggaggcgacctcggaaaaagcgcgcaaggagatgatcgccggtatgaacgccggaaaaatccgcgtactcttcggatcgaccgagatgctcgggacgggagtgaacgcgcagaaacgctgcgtggcgatacaccacctggactgcccctgggtgcgacatgaagtcgcatagataattgttggaatgatacttacgggtatcagttttaacccgctgttccgtcagcggtagcctaccgaccggtgcaccttaatgttgtattaagcggtcgggacaaagtacactttcgcaagacaagacagaaccgtgaggggaagtcaagtacggttagtatcataccgtagagtggcgaggctggatagtatggttagcgcaagcgaactgttagtaaacttcgtaatgtcacgaaagagtgtaagatattggcacactctacccaaaagggaagcggtcggttaatcctctccatggtaggattacacggatataagcaccgccggaggatgagacagaacctaacctatccgttagttatctatgtggaacatggtaagcctgtatatctcctgtcatgtaaaaaatggcaggtaagctgacagcaatgaaagccgaatggtgtgcaggtataagataacagaaaaagcgaatgccgttctgtaatggagcggatacggattgaaccgacatcacgggctgatgtgggcgacatcatccgacacgaaagtgggcagacttctgtgacgacattagggaggcaatcaaaaccgaatgttgtcaaatggtgattctttacaattaacttttagaactttcaaaaggaggaaagcaaatgaacgaaaacaagacatcgtgtgcgcctgctgacaatcagcaaacactttgggacagaatagactggaataaggcggagttggctgtcagaaagctacaagcgcgtattgtaaaggctcagaaggaaggcagaccgggcaaggtgaaagccttgcagtggacgctgacccactctttttacgcaaaagccttagccgtaaagagagttacttctaatggaggtggcaacacccccggggtggacatggaaacatgggagaaacccgaagcaaaaacacaagcgataagcgaactcaaacgcagaggctaccagccgaagccattgagaagagtccacatcaaaaagagtaatggcaaactgcgaccgttgggaataccgacaatgaaagacagagccatgcaagcactctacctcatggcattggaaccagtgtcggaaacaacagcagacacacgttcatacggtttccgcaaggaacgtcgctgtatggatgcggtaatgcaatgccataacattctccgaaaaggctattctcccgaatggattctggagggtgacataaaggggtgcttcgaccatatcagccatgaatggctgcttgccaacatccctatggataaggcaatgctccgaaaatggttgaaatgcggctatatcttcaacaaacagatgttcccgacagaggagggaacaccacaaggtggtattatctctcccacgcttgccaatatgacattggacggattgcagaaagtccttgcagagaaatataaacgagttagaatcaaaggcaagttatattcgccaatggtgaatcttgtccgctacgctgatgactttataattacctgcgataaccgtgaaacacttgaaaaggaaatcaagccattggtagccgactttatgtctgaaagaggtctgaccttatcagaagaaaagacggtgataaccaatatccatgacggtttcgattttctcggtttcaatatccgcaaatacggcaatgaaatattgaccaagccgaccaagaaagccgaaaaacgctttatggagaatatccgtaaggtgacaaaaggccataagggttgcaagcaggaatcattaatcaggatgttgaatgctaaaatccgaggatggggagcatattatcagcatggggcgacacgtgattcttttcacagaattgaccatcagatatttctcgccttgtggcaatgggctaaacgccgtcattccaagaaagggaaacggtggataaaagaccgttattggcacaatatccgagggaacagctggacttttgcggctaagttcaagaaatcaaacggcaaagaagaccaacttaccttgttgaaactggcatcttcgtttcctttcctgcaatatacgcagataaagggggacatgaatccgtttgacgcagactgccgcctgtacttcaataaaagaatgaagtcaaagatgcttgtgacactgaaaggacgtaagtccctgctttacctatgggaaaagcaaggtcggaaatgtccgatatgtggtgaaccgattgacacgcataaggcatggaacgtaatgccaaccgtccaagacggacggaaatgcaatctgttggttcatgacgaatgtttcaaattatcccgtaaaaccaatggaaacaagaagtagtatgagccggtctctgcatataaacagagacttagaaaagcttgagccgtatgaggggaaaccctcatgtacggttctgaggggggaagagggcagtaatgcccttgacctacccgatcgtcccagcgacctggaacagcgcgacgggcggggaatacgcaccgggaacgagatcgccaaactccatgccgacaacaaggtggacgtgatattatacgccgtcgagaagtcgctcgacgcctacaagttcgggctgttgcacaacaagcaactgttcatccgccagctcaagaccaacaacatgggaagccgtaccatcgacgagggggccatcgacgaaaagagcggcatgaatttttccgagtatgtcgccgtcctctcgggaaatacagacctgctggacaaggcccgcctggagaagaagattgccacgctcgaaagcgaacgccaggcattcgtgcgcggcaaatcatcgagccgctacaagctggagcagatcacggagaagatagagaagaacaacgacctgatacggcgtatcggcaaggatctggaacacttcaaggcccgcgtcgagttcaacgaggacggctcgtaccgcaatcccgtgaaactgaacgggctggaaacctccgaccccaagctcatcgggaaacagctcaaccatatcgccgaaacggcacgcacgctcgacaggctcgaacccatcgggagcctctacgggttcgagctgctcgtccagagcgaaacgaccgggaaagacgggctcgacctggtgcagaaccgtttttatgtccggggtgaaggggattatctataccagtataactacgggaatatcgcctccgacccgcgactggcggcgatgaacttcatccacgcgctcgcgaccatcgagccgacactggagaaattccggaaaaagaatgaggaactggagaaagatattcccgtcctgcgggaagtggtggaaagttcctggcgcaaggagcccgaactgacggccctaaaagctgacctgacggaaatagaccgcaggatacagcaaagcctcaaaccgatagaagagagcgagggaaaggaggcggaggaggataacgacgtgtgccgggaacggcatgacacggcggaagagctcccgaaggaagacaacacggcggcccgtattccttcccggctgcggcagattgccgacgcctccggggggcgcatcgtgatcgcgggcgtgggcagcccgccggagaacggccccgcaaagaaagggattaagatgtaagcgaaaagccgacggaagtacagatttccgtcggcttttttcatatgcccatgagcgttgttgtcacacttcctgcaagagtgtttgcagctcctcctgcgtgggaagataggtcatgtactgggcggcgaagacctgcttttcatcttcgggcagcgtataacggacgaccgcgtcgtttttctccgcgcagaggacgatacccaccggagggttatccccgggattcatcaactcacgggtgtagtaattgacatacatctgcatctgccccaaatcctgatgggtcagctccccggatttaaggtctattaaaacgaaacagcgggccaggtaattgtaaaagaccaggtcgatgtagaaatgcttgtcgtcgaaggagatacgcttctgtcgcgcgacgaaggcgaagcctttcccgagttcgagcatcaagcgctgcaagcggctgatgagcagttgctccagatcggtttccagaaaatgctctccctgggggataccgagaaactccaggatatacgggtcgcggatgatctctttgggttcgacacgcccgggttcggtacgggaaatctcctctttcacggctttcttgtctcggctggccagcaagcggtcatagaaaagcgtgttgatttggcggtcgagctgccggacactccagttttccttgacgcactcgtgcaggtaaaaatcacgggcggcatcgcccgacaccttgagaagcgtgcggcaatgcgaccagctcaatttatcacacagcgtgtgatatttcgggtagcactggtaaaactgcctcatgtaccgcaggttggtggccgtgaacccgtttccgaactccgccacgagccgcctggaaagggtgttgatgacagccttgccatatccggcacggccggttccctgctgctcgtactccactatatatttccctacctgccagtaagccctcacgagggtcgaattgacatgatgtatcaccttcgcgcgcgcttcctgcaagatatggcgcacgttatgcagtagctcttcctcccctttgtcggcaggatatattttatctgtttctttcattgttcattattatataggcttccaagtgcaaacatactgattttacggcaaatatcgaacggttgtaccgccttgtcgtgccttattccatgtatctccgcgtttttccatgacgccggactctcgggacagggcctaaccggaaccggcaggacgatcctttttcagcttgcggaaattactgaagttacgctcgatgaaccgcaggacgtccgattcccggtagaaggtcttgtgatagatcatctcgtaaggcagctctcccgaggtgcggtaacgctggagtgtgcgcttgctgatattgagcatacggcacaggtcgtaattgtccagaagacgctccccgtcaggcaggatggaaagcggttgctccacgtcccccgcgcacagcttctcaatacgttccagccgttccgagagccgctgcatccatccgtcgaaatattccttatccagaaacatggcctactcctttggtcggtttttgcgccgcacggaacgctccttcagcacacggcggatttccgtgagggaataatacagcttccggttgatggccgaataggtgatcacgtgatccgagcggaggcgttgaagggtacgcccgctgatgcccaggtaacggcagacctgctcgccgtccatccattcgtcgtttatatactccttattccatgcacgccccttttcagggagagaggcgattgcagcctctattttctctatacgcccgacaagctcgttataggctcgcgaaccgatcactatgattttcatactcctttgttttttagtctgttacaaaggtcgggcttatatggacagcttaaaacgaggtcggtacgacttttttttgataatttgcagtgaactgattctcaacggttcatgcggtgaagaaggcagtgttttttaccgaaatccgcggcccgtactcggtatttttattggcagaaatgcgatagcatactgtgattcaacgcttaacggtgttctaatccggacggggctacaacggaacacccgtatcggctccttatacgggtgcaaatacgggcgttcgggaaagttcctttcgagagttacgggggaaaaccgacctcggttcttttgttatatacaacgctgattatcagttcttctataagaaatagagtgctttaccggttcatgttctactcggaattgccgtttttcttgtttcgcttccacgtctgcatacgtttaagcagggcctctttcgccttgtcaagccacggtgtcgggttgtttcggattttcatatcgcagaatgtcctcgaaaggttcatgtcgaggtgtacgttgaaagcgttggaaatgtagctggcaagttgcgtgagtggcacattgccgaaacagcctttactgtcgagcaggtaaataagttccgtcagatccgtcttcgagtcctgccatgtcggacgcacgtcaggcaatggcagaaccatgttccggaggttcgtgctctccagtgattccaattcgcccataagataaaccgacaacatatcgttggccaggattttcgccaccttgaaatccgcgtttgtcgaaaactgcgggtcgagttcatagtagaaggtttccaggtattgctccgtgtcggtctgcccgcgcaggaaatagaggctgtccaggtgtgtagcgccgctgcggaaatagcggataaagtcgaggcgtttctgcgtgtacgcgttgatggcccgaacatgggcgtccaggtactcccgttgtgcctcgatacttcctaccggacggttcatctcgatattgtagagcttgcggtaatagatcagacggcaaaaaagacgaggtttgatttctttgaagaactttatttcctcgtcatcgttttgaaaacggtagccgatgatatattgtttcaaacggtcgaacgcttctcccaggacacgtgacgcttcaagcgactttttcaacacgtcggtatcccgcgattcgatacgttcgatactccgcaggacttcgctgtttaatttttctataaatgcaatcataatccgtcttgttactttcgcgtataaagttagcgaatcgaaaaaccggcggattacgatttttatctttctcttcgtttttttatcacggagccgattttaatgtcaaatccggctttcctgacggatggaagtgggattgctccccatattccgcttgcaaaagtccgtaaagtgggattgggcggagaaaccgcacatgtaggctatttcctgcaacgtgtagtgtgtcgtccgcagcaactccccgatacgttcgatacggcgctgacgcaaccacgaggaggccgagcagccgaaaacccgctggaaacgccggcggaaggtaatcgtgctggaatacccgcaaaccccagcgagttccgtgacgttatccgaggcaagataattcgatttgacacgggagatgaactcgtaatcgtcccccaggtgcaacagctcctcgaactccccgacatcggcgggagtgagatgttcataagaggcgtcgagcattttcagcatgacagcagcgttacattcaacgggcatacccaatgtcttacgggcttcacgcaggtaattcttgaaccgcagccgcagcgtgtcgtgatgcgggtaggaacactgggacagaatggtgcagaccgtccgcagttcatcgacacaacagtagccgaaataccacgttacaagacgctcgacgtaatggacggcatgaaactcctccgaaagcatcagaagaagcaggaacggggtgaaatcctggtattcccccgttatgggacggggtgcttcgtcaagcaaggaggcaatgtcccgcatcagaagagaatctcccgagtacgcttttatttgttcggaactgcgggcataatcccggtaacgcgatatgaccgccgacaaagcattgaacttcacggcgtgaacgccttctataaaggaagggcgaagactgttgtaaatggataagtcggtttgcataagtcatttctataaaacggagccgcatccccttgttgccaaagctccgcaagtcgttacttatgaaccgcttggaacacggtacgaatcctaattacaaatatatcgtatccgacaatccggaacaaatatcagcaggcaaaaatgaaaataaacctcgttatttttgatttttacctgcaataatattatatttgtaaacaaataagagttgtttgacagcatgagaaatatagtgtatcaaagcactttaccaatttcttatccgttgcctattctcatgcgagtttcttttaatctatttgtagtcaattaaataccttcagactacatcaaatatacgaaaaacatcttacccggagattagttcatccttttccacttttggcagtattaacgactggttagtttttccataaacttattccggtctaccacataacgtatatgtgttccttcaccaattttaccctgtgaatcagaggctactacggaaaatgttaactttcgtccctctacctcaagaagtgtggctgttacaagaaccgtgtctcccaatgcagtgggtttaagatgtgtagtctgaatcattgctcctaccgttgtattgccttccggcagttgatcttcaacagcagacaaagctgcattttccatgaatgctaccatagcgggagtagcaagaacagggagatcacccgatcccattgccactgccagattttccggtttgaccactacttcctttataaattgcaatcctttttctaacataatttctgattctatattttagttatgactattcttctttttagcagactggtagaacagaaatgccaacagagctaaaaaagccaaaagtatcgtaatcatctctgttgtatatgccattggttctacccatatttcatgaaagatattccagcgtcccaatacttctacaaaagtccagaacactactaccgtagcaatagaaaagcgcatggcatatccccattgagcgattttcaacaggcgtttaaacataaaaaatgaacctgccagacagccgaaagcaactatagcagtaacagggctatgctcgccgacaaaattctcatcataacagaagagcagcacgagatagctcgtccacatgatgagatttaactccataaaagtaacaatcgaggtatgacgtgtcatcggccgtactacaatcgtggtggtactcttacggaaaaagactttttgaagataggtaaagaagtcgcatccgctttttatactgaaaatgtaaatcaacataaacatcacccaaaaaccgaaggaggaaggcatgattaaatattccggttttgtcacgacttcaccggcagcgttcagcaatggttgcacttcataacgatgtgcataatatacgtagataaactctacccatccggtccagaagagtagtcctccgaataatccccataatgtctgtcgtgtatctccttttgcaaacactccaataatcaccatcaccagacctactgctcccatcgtgaaagccgcatagtgaagagctgtggatgagagcacatgctccataaaaatcattaatgcatgccccaacggcatagtaaacaatacaaccaggaaagaagtaatccctgtcaatacactttttctactgtagccgcctttcattttcttctcattttaattttttaatcatcaatttagtaaaagactgcaaaaataacgagttaatccactcctcccaatacctacatataattaaagcctctcattttttcatttcttttaggtatttcccccgtatatatatccccgtaactttgcagctggaaatttaattaatcattatctatcaaaattaagtatgaaaatcttaaacttttggatggttgcccttatggcactatctctttcttctactttcgtttcttgtagcgacaacgacgacgatgaacctaactttgccaaagaaatagcaggagcttataaaggttattcagtcggcgcatgcaatatgttctctgattatttgttgggtgatgaatccacagcaacaatcactgccaacgaagatggtaccatcaatttagtatataaatccggatctggagatttcactctgaataatttaaaactttcttctaataagtctttcagcggttccggtgaagttgccatgtctatgggcggcagcacaggcggtagctacgactacacattagaaggtagtgtagatggttctaaagtgttaagtttgaaagccaatgttgatattcctgtacctatgggaaaaatggagattgatttcatacaaggagaaactcctgttggttattatataaaagatacttataaataccaaactaatttatctctttcagtcactactccaggaggaaataccactgaatctactgaggattgcaaagttatcatcgaaaacccaacaggcagtacagtagatgttaccattagcggcttcaataacacaagcggttctatgaattattttgaaaagttcactgtaaagggagtaaatgttactaaagcaaacgacggtagttactcactcaatatcggtagctttgaagcagacacccaaaagactacaggagaaattctggcaatcaccggtacgagtttaagtggtacagttaagtcagacggaacaactactattactgtagtttttaaaccaggaagtatgccatgggacattacagcagattttactggaagcaatactaacagcgcacaataaacgattaaataagcaatgaaaagaagcaggaacgctattttcaaatatactatagtactgggagcggcaatgtcgctctctgcttgtaatggaatatttgaaaatatttatgatgcccccatcgaaacggagatggaaatcaaggagaatagcttttcacaagtcaagactgttgaatatacagaatgggcctacattaacctttcggaacgtacggttaccaccgttaaaatcggagaggaatatgagagtcaaattcctgataagtgggatttcgctattcatcgttatgatataaaaaccaacgagggtgctacctacaaaacaacttacacaagtatcgacgagtttaaagcaacaggtaaactgcctaaagcggaagattttgtagaagatgaatggacaaccgataaaatagctattgacatgtcgggcatgatggacggaaacattatctacacagagtcttaccgtaatactgttctttccagctggctggacgttaataccgcaacgatgcctccggtatacaccatgtcaaaccaagtttttttgatacgtttgaaagacaatacatacgccgcgatccgttttaccaactacatgaatgccagaggtataaaaggatatattgacttcgatttccagtatccgcttgagttcgaggacaacaacaatgaaaccaatcaacaagaatgaaacctacatttataatatcattattgcttttttcatttatagcaacttgcaccacattagcacaacactcaacttatcacatcagcggacgtgtaactgatacagaaggggaacctctccccggtgcaacgatttccatcaaaggtaaaggaaccggagccgtcacatccgtcgacggcacatatacattacaactccccggaaccggtacatacctcatcaccgcctcgtatgtaggctatcagccacaagaaaaaagactgactgtagggaaagagaaaagactaagtttccgcttatcggaagatcagtttgacctgggaacagtggttgtcacaggtacacgtactcccaaattactgaaagatgctcctatcatcactcgtgtaatcacagcagacgatataaagaaggtagatgcaaccaacgtaggacaattattacaatcggaactgccgggcattgaattttcctattcaatggatcagcaggtttctatcaatatgcagggattcggaggaaactctgtactcttcctggtagatggcgaacgtctggcaggggaaactttaaacaacgtcgactacaaccgattgaacctcgataacgtggaacgggtagaaattgtaaaaggggctgcctctactctctatggttccagtgcagtaggtggcgtaatcaacatcatcacccgtgattccgaggacccatggaatttaaatgtaaacagccgcttcggtgaacataacgaccaacgatatggcggaactttcagtttcaaagccggtaaattcaacagccagacgaatgtgcaacatacaatgtccgattcttacgacgtaccggaaggagatgtgacaaccatcttcggaaaccgcacatggaatgtgaaagaacgtcttgtttacagaccgattgaacagttgaaactgactgcacgcggaggttattatttccgcgaacgggataagaccggagacagcaaagaccgttatcgtgatttcagcggaggtctgaaagccaactatgatttcaacatcatgagtaatctggaagttgcctatacattcgaccaatatgataaaagtgattatctgaccccatacaaatacgatgtccgtgattacagcaatgtgcaacatagcgtacgcgcactctacaattacaccttcaacgataaaaacattctgaccgtaggaggagattatatgcgtgactatctattgtcttatcaatttaccaacaatggaagttataccatgcactcggcagatgcattcggacagttcgactggaacccgaccgaacatttcaacgtaatcagcggggtacgtttcgactatttctcacaatctaacgtacgtcatatatctccgcacatcggactgatgtacaaaatagccaactgctccctccgtggctcatactcacagggattccgctctcctaccctcaaagaaatgtatatgaacttcgacatggcaaatgccatgatgatttatggtaatcccgacctgaaatcggagacgagccacaacttctcgctctcggcggaatataccaagaaccgttacaattttaccgtttcaggatattacaaccttgtcaatgaccggatcgacctgacttcattccgcgacactgacggaagatgggcacagctatatatcaatacagagaaagtagacatcgccggtgtggatatcaacgcctccgccaaatatccttgtggtctgggaatacgtgtttcttacggatacctccacgagtttatgcgcgacggacaaatgaaattctccagtacccgcccacattcagcgaccgcacgtatcgaatacggcaaatcatgggataattatcaattcaatctttccctgaacggacgtgcgttatccaaagtagaaaccaataaatatgtgggcaataatccggatgaagggactaccggagtgacttatccgggatatacgatgtggaacctgacgttgacacaagggatctggaaaggagtcagcctgaatatggccgtcaacaacatatttaattatgttccgagctattatgacgcaaactctccttatacccggggaagcaacttctccatcggacttgcattagacgtagacaggttcttcagaaaatagaaaagataaaactacatacaaagctaaaaataagagaaatgaaaaagaaaagtaaaatcatcttaggtgtatgcatcgttgctgcagctctgatagggatgtccgtatggaatacctggttcagtcctacaaagattgctttcatcaacttccagaccatacagcagggaagtatatcgaaagccaacgacaattcatccatcaaactcagtgaagtatcgctcgacaacctcgaccgtctgaccggttacgacatggtattcatcaacggaatgggtctgcatatcgtcgaggaacaacgtcaacagatacaacaggctgccgacaaaggtattcctgtatatacttccatggctaccaacccggccaacaacatttgtaatctggacagcgtacaacagaatctgatacgaggttatctgactaatggaggaaagaccaactaccggaatatgctgaattatatccgtaaagctattgacggtaaaatctcttccataccggaagtggaagacccggcagaaagacccagcgacatgctctatcacgccggactcaccaacccggatgatgaactggagttcctcaccgtggcagattatgagaaattcatgaaggacaaccgtctttataaagaaggagcacgtaaaatcatgataaccggacaaatggctgatgccaccggacttattgaggctcttgaaaaagaaggttacaatgtttatccggttcagtcaatgacgaaattcatgtcatttattgacgaagtgcagccaaacgcaatcatcaacatggcacacggacgcatgggagacaaaatggtggattatctgaaagctaagaatatcctcttgtttgctccgctcaccatcaacagcctggtagacgaatgggagaaagatccgatgggaatggcaggaggatttatgtcacaaagtatcgtgactccagaaattgacggtgccatccgtcctttcgctctctttgcacaatatgaggatgaagaaggattgcgccattcgtatgcagtacctgaacgcttgaagactttcgtatccacaatcaataattatttgaatctgaatactaagccgaacagcgagaagaaggtagctatctactattataaaggtccggggcaaaatgcattgaccgctgccggtatggaggtggttccttccctatacaatcttctggtccgcatgaaacaggaaggatacaacatatccggtctgcctgcaaatgctgaagaactgggtaaaatgatacaggctcaaggcgctgtgttcaactcttacgcagagggagcctttaatgactttatgcaaaaaggacatcccgaacttatcaccaaagatcaatatgaaagttgggtgaaaaagtcactccgccctgaaaaatatcaggaagtggtggatgctttcggcgaattccccggcaactatatggcgactaacgacggtaaattgggtattgcccgtctgcaattcgggaatgtagtcttaatgccacaaaatgcagccggaagtggtgacaactccttccaagtgattcatggcactaatatggcacctcctcatacctatattgcttcctatctatggatgcaacatggcttcaaggctgacgcactgatccatttcggtacacacggaagtcttgaatttactcccaaaaaacaagtggcattgtgcagcaacgactggccggatcgcctggtaggggcagttccgcacttctacatctattccatcggtaatgttggagaagggatgatggctaaacgtcgttcttacgcaactatacaatcatacctcactcctcctttccttgaaagcagcgtacgcggtatttatcgggagttgatggaaaaaatcaagatttacaataactctcaaaaagagaataaagatcaagaatcattagcgatcaaaacgctgactgtgaagatgggaattcaccgtgatttaggtttggacagcattgccaacaaaccatatacagaagatgaaatcgcccgggtagaaaacttcgctgaagaactggctaccgagaaaatcacggggcaactctatacaatgggagttccttatgaaccggaacggatcacttcttccgtctatgcaatggctacagaacctatcgcatacagtctgctggctcttgacaagcagcgtggcaaagcgacagatgccgtcagcaagcatcgcagcctttttacacaacagtatttgacccctgcccgtcagttggtagaaaagctaattgccaatccttcactagccacggatgaactgatttgccgtacagctggcatcacaccgcaagaacttgccaaagcacgtcagatagaagccgaacgcaatgctccgaaaggtatgatggcaatgatgatggctgcatctgcaaagaatgaaaatgctgataaagagaaatccggcaaggatcatccggctatgtcaggcaaaggaaaaactcctcatagcaatatgcctgacagcatgaaggaagccatgaaaaagatgggtgccaatatggaccccgaaaaagctatggaaatggctaaatctatgggagcaaatcccgaagctctgaaaaagatggaagctgccatgaaatccaacaaggataaagagcagcctgccgggtcttcagataaacacgggtcttcagataaacagatgaaaggctccaaacaagaaaaaccgaaaggcatgtcagccatgatggccgctatggggaaagcgacgaaagaatacagcaaagaagagattgaactagcacttgccgtagcggaagtagaacgtacaatcaagaatgtaggtaattataaaaatgcactcatgacaagtcccgaagaggaactaaacagtctgctcaatgcattgaaaggcggatacaccgctcctactccgggcggtgacccaatagctaatccgaacgctttgcctaccggacgtaatatgtatgctatcaatgccgaagcaactccgacagaatctgcttgggaaaagggtattgctttagctaaacaaacaattgatacctacaaacaacgtcataatgattctattccacgcaaagtaagttatacgctctggtcttccgaatttattgaaactggcggagctactattgcccaagttctttatatgctgggagtagaacccgtccgtgacgcattcggtcgtgtcagcgatttgaaactgattccttcagccgaactgggacgtccacgtatcgacgtagtggtccagacttccggacaactccgtgatatcgccgcttcccgcctcttcctgattaaccgtgcagtagaaatggctgcgacagcgaaagacgacaagtttgaaaatcaggtagccgccagtgtgatagaagctgaaagagtgctgactgaaaaaggtgtcagtccgaaagatgcacgcgagatggcttctttccgagtattcggaggtgctaatggcatgtatggtacaggaattcagggaatggtggaatccggcgaccgttgggaaagtgaatcggaaatcgcagatacttacctcaacaatatgggagccttctacggtgacgaaaaacactgggaagtctttcagaaatttgcttttgaagcagcattgaacagtactgatgttgtcgttcagccccgccaaagcaacacttggggagcattgagcctcgaccacgtatatgaattcatgggaggtatgaatcttgccgtacgcaatgttaccggtaaagacccggacgcttatcttagcgactaccggaaccgcaacaacatgaaaatgcaggaacttaaagaagcagtcggtgtagaaagccgtacaacgattctgaatcctacctatatcaaagagaaaatgaaaggcggtgcttctgcagcaagcgaggttgcccagactgtaaccaatacgtatggctggaacgtgatgaaacctgccgctatcgacaaggaactttgggataatatatatgatgtatatgtcaaagacgaatacaaactgaatgtaaaagacttctttgaaaaacagaatcccgcagctttacaggaagtgactgccgttatgatggaaactgcccgcaaaggatattggaaagcttctccggaacaactctccaatattgccaaactgcatacagaccttgtcagacaattcggtccttcgggcagcggatttaccggagacaatgccaaattacagcagttcatcgcctctcaagtagatgcgcaaaccgcagccaactacaacaaggaactgaaacaaatgaaacaagccaccctggacggagaagcgaccaaaggaggcatggtattgaagaaacaatcgagcgatgccgtacaaggggcacaggaagagcaaaattctttgaatggaggccttatcacaggtattgttctggtagcatttgttgtcatgttgctaatacttaaaaagaaacggaaaaagtaatgtaatatggagttaatcattcacatattaatgctgtttatcgtgattaactgcagtttcaaactcagtttctggaaactttggcaaaccgtaatatacagcctgatagccggtctttttgtagccggcacctggcagtatgctattctccagtcaaagacacagattgctgattatctgcagaacacggaagcattgcaaaacatggctattatcataacgcttgagtcagcactctgcttcggctattgcgtggctttcctgcgcggactttatggtaagaagaatttatggtgggcggaattacttcgctggtatcccagcttgttgctcttccccgtattattctactatctcacagaagctatcttccggttacctggcgtagacttttcagtgacagcctggtcacttgcagggatagtggttatcgccatcccattattaagccggctgatgaagtatcttgtacccgaagacgatctccggttggaagttcatttccttgtcagcttattcatctgtatcctcggactactgaccactgtcaatgggaaaacgacctatgccgccaccgaagaggcgctcaactggaaagcgattatcttgtccatcggtctgttcgttgtcctgtttctcattggatttgcctggaacaagctgaaatggcctttattacaacgtaaagaattaaaaaaaagaagtaaaatcaatcaataaaatattatatggaactcatctctaaacttttattctgggtagcgaacagtttacttatacccgatatcattattttgctgtgcctgttcgttcgttcacttattttgatcggaggcacctacaacatgtacatgaccaaacgtaaaaatgacaaagcactggaccaactcattaaagatgcacggatagacgatctgaaagcagctttacccgacaaagacaattcactatatatgggttatctccgcgatctgctctaccatccggccagtgcagattactctgacttcctgataacaaaattcgagaatgaagcagagaaagatgtgtctctttctaaaatgctggctaagataggtccggttctcggattgataggaacattgatttccatgagtccggcacttgtgggactttctacaggagatatctccggaatggcatataatatgcaggtagtatttgcaacgactgttgtaggtttggttattagtgctgtgggactgatatccatgcagttcaaacaacgttggtatgccaaagatgtcaacaacctcgattatgtatcaagagtattaaacgaaacaaccggagagtccaataatgaaaagaaatagaagagtcagcaaattcctcaaagaagaggataccgacccgctaagtgtagtagtaaacttgttcgacgtagcgatggtatttgccgtggcattgatggtagcaatggtgatgcacatgaatatgacggaagttttcggacaggaagatttcaccatcgtgaagaatcctggtaaagaaaatatggaaatcatctccaaggaaggaaagaaaatcaacacttacaagccttccggtcagaaagaggaggattcagggaaaagaggaagaaaagtagggatagcctacgaactggataacggtgagattatttatgttccggaataaccattaaaagtatatttcctaccaataatcaatagtatcgggcaggacaatcctattcaggcattgtctgccctttatttctttcattttacattgataactatcagaacaaaacatggtttcttctttatcaaaacccgacaaaagacacacacattatcgcagaaatctactaatcatctgcctgttattaggtatcgttctcattactttctgctttttgctttgccagcacgacagtcaggatatggactgcgattgcttaagatgcctgttaagtactcctccccaggagggagagtatctctacaaccgttatctgctcctcatcagtgttctctgcttcttgttaatattcctgcccatttatatattcgaacatcgacaacatataaaaaggaaataaaaaaacaagccaccgaaatgagtcactcattccgatggcctatcccctttaaacacctttaaacaaaatgaaaatatgcctcatatactaactaaactaactaaccctcgaggcatattttaaaagagactgtcgcatcaacctctttttattatagatagctttcgctctctaatcttatttacgagcttcagcaatatagccgagagcttcttcacattttgcagttacataagcccagtcttctgctgctaccttatctttcgggaacagtttagagcccatacctacgcagaatacaccggctttaatccatgcagtcaggttttctttagtaggttctactccacctgttaccatcagcttagaccatggcatcggagccatcaaacctttcacgaagttagttccgtaaacatcacccgggaatactttgcaaagatcgcaacctacttcctgcgcaaaaccaacttctgacacagaaccacatcccggagtataagctaccgagcgacggttacataccttagcaatttcagggttgaacaacggacctaccacgaagttagcacccagttgcaggtacatagcagcagtagccggatcaacgatagaaccgataccgattgccatttcagggcattcttttgctgcgaatttaacgatttcagcaaatacttcctgtgcaaagtcaccacggtttgtgaattcgaaagcacgaacaccaccgtcataacaagcctttactactttctttgcaacttctgcatctttgtgatagaatacaggaaccattcctgtagagccgatcttattcaatacggctattttatcgaattttgccatcttattatttactatttaaatgaattgattttctttacttttcaactctccaaattatctctgtacgcgaccgcttgcgtcaccaccagccaatgcttctacttcttctacagaaacaaggttgaagtcaccattgatagtatgtttcaatgcagatgcagcaacagcgaattcaagagcagcaccctgattaggtttagtcatcaaaccatggataataccgccggagaaagagtcaccaccacctacacggtcgataatcggatcgatatcataacgctttgaagtatagaattcttctccgttgtagatcatcgctttccaaccgttgtgagtagcagagaaagattcgcgcaaagtagaaactacatatttgaatccgaattctttcatcatctgctggaagatacctttgtaaccttcagcatctgtgtgaccagcctcaacgtcagcatccggcttgaagcccaaacaaagttctgcatcttcttcgttaccgatacatacgtctacaaactgcatcaacggtttcatgatagactgtgctttttctttagtccacagtttcttacggaagttcaagtcaacagaaacagttacaccgtgacgttttgcagcttcacaagccagacgagtcaactcggcagccttgtcagagatagccggagtgataccagaccagtggaaccagtcagcaccttccatgattgcatcaaaatcgaaatcagcagcgtcagcttcagcaatagcagagtgagcacggtcataaataaccttgctaggacgcatagaagcaccagtttccaagtagtagatacctacacggtcgccaccacgagcaataaagtctgtcttaacaccatatttacgcaatgcgttaacagcagactgtccaatttcatgtttcggcaatttagttacgaaataggcctcatgtccgtaattggcacagcttactgcaacgttagcttctccaccaccatatactacatcaaaagaatcagattgaacaaaacgagtattacccggagttgataatctaagcatgatttcgcctaatgtaacgactttctttcccataatcttatgtttcaatttctaagttattaatattatgaactttcaatttatcattccagccccatttcaagggttaacacattgattatatgaatattaatatataacataactaatatcacatacctttcgtgtgcgggcacaaagatacaacaattttcgtaattacaaaaattgttatatatttgtatcgaaaatattaagattattattgtgtgcgagcacaaaaacctatataaataaaggttatcgtatgaataaattgcccgaaaggatcaggatcaaagacatcgcccgtctggcagatgtatcagtgggaacagtagaccgcgttatccatggacgtagcggagtgtcggaagccagcaagaaacgcgtagaagaaattctgaagcagcttgactaccagcccaacatgtacgccagtgctttggcttctaataagaagtatacgtttatctgtctgctgccggagcatctggaaggcgaatactggacagcggtagaaaccggtatccacgaagctattgccacttattcggatttcaatacttcggtgaaaatcaactattacgatccatacgattatcattcattcgtcaacgccagtgaagccatcctggccctgcagccggacggagtgatggtagctcctaccgctccgcaatatacgaaaggattcaccgatcagttgcaggcactggatataccttatatatatatagactccaatattaaagaggttcctcccctcgccttctttggtcagaactcacgtcaaagcggatatttcgctgctcgaatgatgatgttactggcacgggaggaaaaggaaattgtgattttccgcaaaatacatgaaggaattgtaggatctaatcagcaggagaacagagaaatcggttttaggcagtacatgaaagaacatcatccgtcttgtactatactggaacttgacttgcatgccgaacgcaacgacgaagataacgagatgctggacgaattcttccgcacttatccgatggttaagaacggaatcactttcaactctaaagcctacatcgttggcgagtacctgcaaagccgtggaaagaaagacttcaatctgataggctatgaccttctggaacggaatgtcacctgcctgaaagaaggaagtatctccttcctcatcgcccagcagccggaactgcaaggagccaatggcatcaaagctctatgcgatcatcttattttcaagaaagaagtgactcgtatcaactatatgcccattgatctgttaacagtagagacaatagactattaccatagcaaataacaacaaagtacaactttacaagtacattacatggaaacaaagtatttaagaattaatcctgccgacaacgtcgccgttgccattgttaacctcccggcaggagagcatctttctgtagatggcattgagattacattgaatgaagacattcctgtgggacataaattcgcattgaagaactttgctgaaggcgaaaatgtaatcaagtacggttaccctatcggacatgcacggatggcaaagaaacagggtgactggatgaacgaaacgaacatcaaaaccaacctcgccggattgttggactatacttacaacccgattcaggtttctttggatattcctcataaagatcttacattcaaaggttatcgtcgcaaaaacggtgatgtaggggtaagaaacgaaatatggattatcccgacggtaggttgcgtaaacggtatcatcggtcaactggccgaaggacttcgtcgcgaaactgaaggtaagggagtggatgccattgtcgctttcccacacaactacggttgctcacaacttggtgacgaccacgaaaatacgaaaaagattcttcgtgacatggtgcttcatcccaatgcaggtgctgtattggtagtaggcttaggatgtgagaataaccagccggatgtattccgtgagttcctgggcgagtttgatgaagaccgtgtgaagttcatggttactcaaaaggtaggtgacgaatacgaagaaggaatggaaatcctccgtgatttgtatgcaaaggcttctaaagatgaacgtaccgatgttcctttgtccgaactacgcgtgggattgaaatgcggtggatccgatggtttctccggcattacggcaaacccgctattgggtatgttctccgatttcctgattgcacagggaggtacaagcgtattgactgaagttccggaaatgttcggtgcagaaacaatcctgatgaaccgttgtaaaaacgaagagctgtttgaacagactgtccatctgattaatgacttcaaagaatacttcctgtcacatggagagcctgtaggtgaaaatccttctccgggcaacaaagccggtggtatctctactctggaagaaaaagcactgggatgtacccagaaatgtggaaagagttatgtatccggcgtaatgccttacggcgaacgtttacagaaaaaaggactcaacctgctttctgctccgggcaatgacctggttgcagccactactcttgcagcaagtggatgtcacatggtacttttcaccaccggacgcggtactcctttcggcacttttgttccgaccatgaagatttccaccaattcaaccctggctaaaaacaaaccgggatggattgacttcaacgccggtgtgatcgtagaaaacgaaccgatggaaaagacttgtgaacgcttcattgattatatcatcaaagtggcaagcggtgaattcgtaaacaacgaaaagaaaggctatcgcgaaattgctatctttaaaacaggggtaaccttgtaaacaggtcgctatctgatacaacaaatatatcgaagataaaagatacattgttaaaacaatagagttgctatcccgttcaacttatcattgagtgaaggatagcaactctttttttgttataccatatcatcgcctgttttcttaaacgtaacgcggattgttttatggaaaggaataaaacgagaaatcacagctatgacaacagatataaccaacaaataacccagaatctctttcagtgccagcaacaggctttgttgttgtaacgtattatataaggagttggttgccaactgcgcagcctcatcatacggatgtccctgtgtcatcgcattgttcagcgactggctatagcgtgttgacgacaatggatcagtagcagttatagtctccgacaaagaatacatatatttttgttgcagtcggtacagtacattactataaaaagaagtcgccatgataggtgccagcacggaacggaaaataatcaggaagaaagcattcgacaataagtatttcggattcaagtcttccacggcaaatagggcaaaagcaataatcaaagtcaacatacccaaaccacgaaagaagataggcaggtagagcatctcatacgtactatccggagaaatgccaaaatacaaaatggcaaagaaaatcacaaagcaactcattcctcccgctatcagaaaacggaaacgccaccgttgccagcgaaaccaccaaaaacaaataaaggcgccgactacatatcccggaagcaaataaatataaagagaataggtatgcgtagtatctactttcagaataacagtcagatagttagtcagcaaagtggttgatgtactgaaaaacatcacgagcatcatataaaaatagcccacaattgctttgggttggaacaaaggagccagacttacataaggattctccaaacggctctgataccagatgaacagcgcaatcagcataggtgctattacaatataaatacatatcttaccggaagccatccaatcgagcactttgccataattgataacgtacatcaacatcagcaacccggccgaaataacaaacatctcacggatatgcagatcagaccatgcgacagcttttatgggacgattatgccggaaacagatgataacaaacagaatggaaatcaagatcaataccatcataaagtagtacatatacttccagttataatgatacgccagtaaagccgttaccagcatcgaagcttgtcccccaccgtaaaccaacggataaaaataagaatagaactcgctacgcacattcttcggactgaaaatcttctgggcataacgaataaaccacaacataagaaaccctttcaagaaaccgacagcaaaactacagacaatcaaaatatctgcgttttgcgtacgtgcacaaacccaactcaagaagaattgcagtactaaatcaatcaataacagagatttcacggaaaaggctgccaacaccttaggaataatcgggtatgcgatagccatacctgccgaagcagcgtaataccccatcgtaatatcttccgaattagtacccagcgtgttcgacacttccagcatactgcctgtatacgagccattgagcatagtgaccggaagaatcacgatgaaaatgctgataagtccaagccaatcgggcacccattgacgaacaggtgcctccaattccttcatggtaatcatttgcgtaaagcttctgtttccaccatcatcccggctctcaactgtgccatttcttccggagaaacatcttccaagtcgatacgcacagggattcgctgctgcacctttacaaaattgccggcagaattatctgtaggaaccaaggaatatttagacccggttgcctcggaaattgcagtgacttccccgtgaaaaatctttccgggcactgcgtctactttaatacgcacctgctggccaatatagatattagcaatctgcgtttctttataattagcggtaatccacttgtccttgttacgcaccaaataagaaatagtctgtccggtctgcacatattgaccgggttcaagcgtacgcctacccatatatccatcataaggagcagtgagaaccgtataagacagattcagcttagccaaatccaggtctgcttctttacgcaaaatggcagcctccgtaccggttgttttcttacttgtctccgcatattgtgataatgccgcctgtttctgtgcaactaatgcctgataacgtgcctttgctgcctcataagcagctttcgcttgctcatactgctgttccggaacagattcttctttcaacaaacgttcaaaacgatgataatcctgtttcaattgccaaagtttcgctttcgcttcagcgatgttggcatcctgtacggcaatattcgtatgggaagtttcaatacccgaatgaagaacatcctgcgagccatgtgcatccaacaatgcagcttccgcttcctttaccttaatctgatattcacgattgtcaagcaccagcagagtatctccctgatggacatattgatgttccttaaaacgaacctccttgatataacccgaagcccggacattcaaaggagctacatattgatctacaaaagcatcattagtcacttcgtaattcacataacgccagaagtaattagcagtccaccaaagtccggagacagccaaacagacacatactaaatttaaaacgatattacgaactcttacttttttcagtttcttctgtttttctttccattcaattgccatatctgttctgtttattaaagacgtccacaagccttctgaagttgataataagtataaatcacacgagtgcgtgcagtgaccaactgcaattccacattcaaacggacggaattcgcatcaagtaaatcagtcaggatagccagttgattcagataacgattctgcataatacggtaattttcttccgcttgccggacagacagttttagagcctctaccctctgcaacgcttccctgtggcgtaaaaatgccgaacgtacatccatgcggattccctgcattttctgttcttcttcattcttccgcaaagacaccatcagtttgctctcttttactttatgattgttcttgtacagtgaagataaaggataggaaaccgatactcccacattccagttattgttatacatatccgccaatgtacgtgaaacgggacgtgccaatgtattcgatgcatatagcgacacactgggaagagataaggattgggcagaacggatttcattccttgccaattctgtctgtgcgcgaagcagcctcatcgccggatcattttcatacgcctgaacaatatagtcatcataggactgcaaagcaactgcctgatagagaatggttgtatccggttgtaataacaagttctcatcctgccccaacaagatattgagttgctgcgatacaagcgcaatgctattttccgcttcctccaaagacagtcggtcattagtcagctgcatttcgctccgcaatacatcattattggtaatcagcccctcttttttcattcgccggatatcgcgtaaccggagttccgactcttcaatattccgtgtcagtatctcatgctgcttaaacagactaaacaagttcatatactgattgagtaaccgtaactttatttccgcctcatcggtcaacgtttgtagttcggcaacttgtttttctatatccgctttatgaatagcacttcggattttaccaccctgatagagaggctgtgccagatcaatcgcataattttgtgaccagtccggtgcttccggatatgaaggatcggataatccccgttcccaaacaacaggctgccctacaaatccccctttcagtccgatctgcagttccggtaactgtgcagaccgtgcggtccgtatccgctcctgcgccatagattctttcattacatccgcctgaagttgcagactatgctgtaccccccgttcaaaaagctgatcgatagtgagaaacaaagaatccgtttgtgcatttatggattgagcagccaaaaacaggctagataaaaccgccccatacttcttatacattttcaagtacatcgcatacactctttaattcagacaacatagtttcaatgctctctataccaacaattttttctgcatatacataaacctgatcgagaatcggacgaatctgttctttaaattcttccccttcgggagtcaggaacaccagtttattacgacggtcggcaagatcttctttccgatgaacataccctttcttttccagattattcatcaaattggtgagacatgccttatcttttgcaatgcgttccgccaatatctgctgactaattccctgctcatgccataaactacttaatacctgaagcatctcaaacgtaatacccgcattattttttctcaatgtccgttgcatagaccggcgaaaagccatacgggtacgaacaatctgcaacatgagttctctaaactctgctccttctctcattttctatactctttttacctgtttcgtttcggcggcaaagttaggtatttcctccgaattagtcaaacgtttgactaatttcattttcaaaccctctttatataatttctgactattcgttcattcacccattaaacaactgtatattaacgccttatcataccattcaaatatttatcattaaaatattcaggcaaaaagtttgttcatctgaaatcttttattttactttgtatcacaaagtactttttatatggataaagataaagcattagaatcggtaaatgagataaaagagttgatggaaaagtcgtccaagtttatctctctaagtggtctcgctgcaatcatggcgggcatttacgcattagctggcgcatacatcgctacacaagttattaccccgggcacacatttaattgttgctctcgaactaatggttattatagcttcgctcgtattggtagcagctgcggtcaccgcctgcatcctgtcctattataaatccaagaagacaggacagaaatttttcagccgcctcacctaccgggcattgtggaacttttctcttccgatgctgaccggaggtgttttatgcatctccatcatgatgcatgagtattatgacatcctggcttccgtcatgcttttattttacggactagcactggtcaacgtatccaagttcacttactccagtatcgtatggttaggatatgctttcatttgcctgggagtcgtagattgtttttgggaaggtcattcactgctgttctggaccatcggtttcggcggtttccatattctttatggcatattgttctatttacactacgaaagaaagagatcataaatgatagaagcattccaatatattaataaagcattcgaaagcaaggtccggctcggtatcatggctattctgatggtaaatgaggaagccgacttcaattttctgaaagagcagctctctctgacagacggcaatcttgccagccatacccgttccctggaagaactgggatatatcgtatgtaacaaaagttttgttggacgaaagccacgaactgtttttcaagcaaccccgcaaggcagagaagctttcaaatctcatattgaagctttagagaaatttctaaaatcaaaataaataattcatcaaaacactactggcttatggacggtttcaatgaaaattcaaatgagcaacaggtgcagcaacctatgggatgtctccaccgtttctccaaaacaatcaaggttgtcatcatcggattattaattcttctcctgatgataccgatgttcatgattgaaaatcttatttccgaacggggacgaacccaggaagaagctatcgacgaggtaagtgaaaaatggagtctggcacagaccatcacgggcccctacctgaatctccagtatccggtcgtcattgaaaataacggcgagaagaaggtttctatcaaagacctgatactttttcccgatgagcttatggtcagcggacaactaaagactgaaattctgaaaagaagtatctacgaggtcaatgtatatcaatcggaactgacattgaaagggtcattcagttcggaagaattgaaaaagagcagaatagatatggaacagctgcagtttgacagggcagctatttgcctgaatctgaccgatatgcgtggcatcagcgaacaaatcagcatcactttgggagattcagtttacatcttcgagccgggtatggacaacagaggcatagataataccggagttcatgcgatcgctaatttgtcggaattgaagcagaataaaaaactcccttatgaaataaaaatcaaactgaaaggttcacagtcactcaactttattccgttgggtaaaacaacccgtgtagatctgaaagccaactggaatacaccgagctttaccggaaactatctgcctaacaaccggaatattacggagaaggaattttccgcgcaatggcaggttttaaacttgaatcggaattattcgcaggtgatggctgactacaacacctcgaacatcaaagatattgaaaactccagtttcggtgtgaatttcaaaattccggtggaacagtaccagcagtccatgcgctccgcaaagtatgccattctgattatcctactgactttcggagtgatcttcttcactgaaatcatgaacaagacccgtattcatgccttgcagtatttattggtaggactagctctctgtctattctacagcctgctcctctctttctccgagcacgtcggtttcaacccggcctatttgttatcttctgcactgactattatactggtaggcggctatatgttcggaattaccaagaaaaagaaaccatcattaatcatgtccggcctattggctatactctatatttatatctttgttcttatccagctggagactttcgcattattggcaggcagcttaggactgtttatcattctggcaatagtgatgtatttttcaaagaaaatagactggtttaatgaataatcggcttttcttctgaaacacttgacaaatggctttttattttgtatctttgagaaaacaaaagcaataagagaaatgaaaaaactaggaaaaatagagacataaaggacctttaaactgatacattttagtattaatacagatatatcatagggcaatgatctaacgatcattgccctattttgtttatatttttacttaactcattctatagaatctctaaaaatactcaaaatagtttttaataaactctgataccgtttataataaactatcaaaaagtttattataaaccgaaagtacgtttattaagaacgtagtctttaattgtaaaaattgacaaacacgttttcatacaataggaggttataaataagccgttcattcatacagtaacataaacaaacaaaattctttatttcatccaaacgattgaacttccttcactcactacacactaaaatgttttcttcaaatatatcatatccaccaactgcacaccatcctcatacatcggatgatcgtagttgtcagtaaagaaattctttatccggtgagaaaccgtgaaaccacagtgttcataaaaagatctggaagaaggtacatcgcctgtacccactaacatttcagaacactttccctgataatattcaaataaaaattcgattaaacgttttccgtacccctgccgttgaaagaaaggaacggtagcaatattcttgatttcataaataccttccccttcacgagtcactacacaaagagctttcaatccgttatcataaagaacgaacatatcgccgcgctccaaataccggtcaatcatactttcctgttcatcagccaagagtaataattcgagaaattcttttttatctgaagttactagctttatctccatattatctattttatcataaaataaaaatgttaccgactcatttgtctgtggtccaaaatagtatccatattctccaaagcccatcccaccagtccttcaatatgaggaatcaaagtgccacccgtatctgtcagacaatactccacacggggaggtacttcagcatatactttccgttcaaccaatccatctgattccagagtacgcaatgttacagtcaacattctttgtgaaacatcttctatcgttttatgaatatcactaaaacgcatggtgccgtttgcgttcagcgtaataagcaccagcatcgaccacttgtctcccaagcggctaagcacatctcttatcggacaatttcctatcggatgaaagtttttcattctttaacgttttgtattttattgagttccaacaatagttacctctatgtaacttccttattttcaagtacgttattgcatttctcaaactagaaagatacatttgcatcacaaaagtaataaacttactaataataactattgtttcatttaaataattatgattatggcaaagaaagttgcagttttagcagtgaatccggtaaatggttgtggattattccaatatttggaagcgtttttcgagaatggcatttcatataaagtatttgccgtatcggatacgaaggagattaaaacaaattcagaaatcagcctgacagcagacgatgtgatcactaatttgaagggacacgaagatgaattcgatgcactcgttttctcttgtggggatgcagtacctgtatttcagcagaatgccgataaaccctataacgtagatttgatgcaagtcattaaaactttcggagataaagggaaaatgatgatcggacattgtgccggtgcaatgatgtttgactttaccggaattaccaaagggaagaaagtagcagttcacccattagctaaaccagctattcaaaacggaacagctaccgataagaaatcagagatagatggcaacttttttactgctcaagatgaaaacaccatttggacaatgatgccacaggttatcgaagcattaaaataatgtttgcaacgtagatataaaacaataaatataaacattattatattaatctacgcatccgaagatgaaaaagcacgttcctttaaaagcaacagtgtgtttctcggtgtacaacgggtcgtttcttttaaaggaacgacccgttggttttaaaggaaaaatgtacatttattgcgcattaataatcaatcacttacagattcaaaaaattcaatgaccgactaacttccccaatcattattcaattcaataaatccgcacaagtgttcactcctttatttctcaaatgattattgttagttaactaaaatccaagagaaatatcatatatcacattctcttttcgtaccaaaaaaaagaaaaacggaacattacaaaaaatctgaaacagcgttcatcattttttaaaagtccgtatattagcagcttgaagacttgaaagagataaacagcatactccttccgagtttaaataaccaaacaagatgcctaaaacaatatgattagagaaagagagaattacaatgcatttttacttcattttttagaaagactgaatagctgtgactctattgagaaaaaaatcacagaatcacttacggatatttgcgaatactatggctttaaaagaggattcatttatcaaactgacggatttcgctacttctatctaaaggaaactgtcggaaataacgacaacgttttgcgacaacgttttgaaatcagcgaaatgaccaatcaacatgttgtccgtgcaaatggaaagaacaaacctttttatgcttgcagaaaccaaaatacttcttgggatgatgtagacatcgtggatttctataaagtcgattcattactaatccggcaaattcaagactccgaaggaaaaattatcggattcatcggatttggagacagagaacatgcaatatctttcaccgatgaagaactgcaaatgattcatctcattttaggctccctctccaaggaaatagcagtgcgggaatataaagaaagagaagtacgggcgagcaagacgttaagcagcatcatgaataatatgggggttgacatctacgtaaactcttttgattcccatgatatgctatatgccaatgaatctatggccgctccttatggaggtatcgaacactttgaaggaaaaaaatgctggcaggctctatataaagataaaaccggagaatgtgagttttgtcctaagaaacatttgatagatgaaaacgggctgccaaccaaggtatattcctgggattaccaacgcccgttcgacaaatgttggttccgggtattcagtgcagcatttgcctggatagacggacagatggcacacgtgattaccagcgttgatattgaccaccaaaaaacaatagaagaagaactaaggatagccaaagaaaaagcggaaaacctggaccgcttaaaatcagccttcctcgccaatatgagtcatgaaatccgtactccgctcaatgcgattgtcggctttgccagtttactggtcgaatcggatgacaaaaaggaacgccaggattatgtcgatatcatgcaagaaaacaccgaacttcttttacaactgatatccgacattctcgacttatcaaaaatagaagccggaacactcgacttcaccatggattatctggacatcaagagcttctgtgaagatatcatacgcaattatgatataaaagaagataagccggtacctgtattactagcccccaccctacccaatttttatatctatactgacaagaaacgtctgatgcaggttatcacaaactttatcaacaatgccctcaaatttacaaataagggacagattcttcttgaatatcatctgaaagaagatacctgtgaaattgaattttccgtagctgatacaggaatggggattgaaccggacaaagtagaccgggtattcgaccgctttgtgaaactcaattcattctcaaaaggcacaggcttagggctgtctatttgcaggagcattatcgaacatctcggcggcactattggagtggaatccgagatgggaaccggctcgcgtttttggtttactcatccctaccaaagcgtatccctataaaattgaataaaaagcccgttaatcagaaaaagacctgaagtctttttttcattcattttttatggtcaaaatcaagtttaattcatttattattaatacttttgccaatgcataaacttaataagccaccagaaaattaaatttaaaatgacaactctttttcaaaccaaaataattaactcatatataataaaattatttttgtctttctgtctattagctttttcctacatatcaccgattctagctcaaaaagattcagtgaactcgtcaaattatcttttaatcattaattcatatacagaagcagctccctggagcttcagaatgatttcagccattaccgaatatgcccagaattcgcctcaattagcactctataccgaacacatgaacatgctaatgatggacacagactccactttgaatgaattcagacaggcagttctggaaaaatacaagcgacattctccgcgtatgttgatattactcggaaactccagcatgatattacgggacgacttcagaaagatgtggggaaatattccgattatactatgtgctgaagaagattacatcggcccgaaggaattttatctccaaaagaagcctgttgagttgactgcaagaaccccgattgcagatatggcgcagccttacaatctcactttcctacattccaatttctatattaaagaaaatatagacctgatttgccgaatgactcccgatattaaaaatttcatatttatcggtgatgaacggcaaaacaaccagacttacaatatggttatcaaacaagaattgaaaaagagccatcccgacatcaattatcaattcatatcgccccggaagatgcaaaccaatcatttactggacaccctttacaccgttgatcctaaaacaacaggaatacttttctcttcatggttttacaaacacacctttgccggcaacacctcgctagttacaaattcacacctattagtctcaacgacttccgcacctctgttcagccttgggatgatgacaatcaaggacaacgcaggaggaataattggcggatacatctacgatcaacatgtatacagccagaaaatcatacaaacgatccaatcaatattgaatggcaaacaagcatccgagatacctttttacgagccttcagatgccgctccgactatcaactacaatgttttgctacgtaaaggaatgtcgccatacttatgtccaccgggcactattttctttaacaagccgcctacgttttgggaacagtacggatactttattttaggaaccatagtctgcttcatactgcttgccctattcttccaataccgcatcagtcatctgaataagctcaagaaaatacaacagaaagagattgacacaatgacttcttacaaaaacctgattaacaatatgcctatattgtatatgcaagaagagttaatcatgaatgaagaaggtaccccgatagaacttgtataccggaatgtcaacgctcatttcgagaaaagttttttccgtaaagaagatgtagtaggcaagaaagccagtgaaatattccctgaatccatgccggagttcctgcatttcaccaaaatgtcacttgcggaaaacaaggctatcactttcccctattatttcaaacagatagacaccttctatgatgtagtactaaaaggaactcaccacaacaatattgtcgatattttctgcctggacagcaccgaactacacaaagcacaacaaaaactaagtgctaccaacaataaactggcaatggcactggacgtagccaatatcgtgccttggaaatgggatttgcgaagcaaaaccatactttgcgacatcaataggcctattgagcttagcacaaacgataaagacgtgaatgaagaacaattggcagtgcccgattcccaatatttctcaaagatattcaaagaagaccgtaaacgggtagaaaaagcctatgatgacctgatagaagggcgatcggataaagtcagggaagaataccgggttatcaatgtacagaataacattcacagaatcgaatgggtggaagctcaagccgctgtagagacccgtgacgaaaacggcaagccgctcaccctggtcggttcttcactagtcatcaccacacggaaaaagatggaaatggaattgaccacagccagagaccgggcagaagaatccaatcgtctgaagtctgccttcctcgccaatatgagccatgaaatccgtactcccctcaacgctattgtcggtttctccggcatattggcttcaacagacgaggaagaggaaaagcaggaatatgtgagcatcattgaaaacaataataccttgttattgcaattaatcagtgacattcttgattaatcaaagattgaagccggaacattggaatttcaatattccaacatagacttgaacaaaatgctgaacgagttaacgagctcattacaattaaaaataaaatctgaaaaagtacagttaacctgccatctggcagagaaaaactgctttatccatacagagaagaacaggctgtcacaattgctcatcaacctgataagcaatgccatcaaattcaccactgaaggatacattcgttttggttatgaactccgcggcaaagagatctatttttatgtcagcgatactggctgtggcattcccaaagacaagcaaaagagcattttcggacgcttcgtcaaattaaatagtttcgaacaaggcaccggcctgggactttctatctgccagactctggtagaacacatgggaggtaccatcggagtagactcggaagagggcaaaggttcaacattctggttcacgctgccatataaagccgcaatagccgtagaagaaagcataaaaaaagaggaaattcagccgataagtatagaaaaaaacaagtttaccattctgattgccgaggataatgaaagtaactacaaactgttcgcatccatactaaagggagagtatcaattaattcatgcctgggatggacaagaggcggtggaaatgttcaagcaatataatccgcagattatattgatggacatcaatatgccggtcatggacggttacgaggcaactaaagaaatacgcaaatattctgccaaggtacctattatcgccattacggcttttgcatacgcttcggatgaacaacgggtgatggaaagcggttttgacggctatatgcctaaacctatcaatgcccgcctgttgaaagcacaactgacggaaatcatgcaaaagcgtattattttactttaagagacagagaaccgaaagcaaaaaacgaatatctacatattccatttatgactgaagaaaaaatacataaaaaccgcaccggaagttggtgggcattaagtccgttgctcgtattcttatgcctttacctggtaacttccattcttgtcaacgacttttataaagtgcctatcacggtggctttccttgtttcttcctgctacgccattgctattaccaaaggattgaaactagaccaacgcatctatcagttctccgtgggagctgccaataaaaatatcctcctgatgatatggatattcattcttgccggagcctttgctcatagtgcgaaacaaatgggagcaatcgatgccactgtcaatctgacactgcatattctgccggataacctgttactggcaggcatcttcattgccgcctgtttcatctctttatccatcggaaccagcgtaggaactatcgtcgcccttactcccgttgccgtaggactggcagaaaagacagaaatagctctcccctttatggtagccgtcgtagtaggcggttcttttttcggagacaacttatcttttatctccgacaccaccatcgcttcgacaaaaacccaggaatgtgtaatgcgcgataaattccgtgtaaattctatgattgtcgtcccggcagccatcattgtgttgggaatttacatatttcagggactatccattaccgctcccgcccaaacacagaccattgaatggatcaaagttataccttatataatagtattaggaacagccattgccggaatgaacgtgatgctcgtactcataataggtatattgacaagtggcatcattggcatcgcgaccggcagctttggaattttcgactggtttggtgccatgggaacgggaattacaggaatgggagaactgattattatcactctattggccggagggatgctcgaaaccatccgttataacggtggtatcgatttcattatccggaaactcacccgccacgtcaatggtaaaagaggagccgaactaagcatcgccgccctggtaagtatcgccaacttatgtacagccaacaacacgattgccattataacaacaggaccgattgccaaagatattgccgtgaaattccatctcgaccgaagaaaaacagccagtatcctcgatactttctcctgcctgatacaagggattattccatacggagcgcagatgctgattgcagcgggacttgccagtatctcccccatcagtatcatcggaaatctctactatccgtttacaatgggagcatgcgccctgctagcaattttgttccgctatccgaaacggtattcgtaaaaaagatgcgaaatgtttgtcaatcaaaagaaaagccgtatctttgtgcccgctattacgagataatagcataattcaaatcaatcattaaaaacaattatttaaaatggcaactagaatcagattgcagagacacggacgtaaaagttacgcgttctattcaattgtaattgcagacagcagagcaccacgtgatggtaaatttattgagaagattggtacttacaaccctaacaccaatcctgctacagtagatttgaatttcgacgctgcattggcatgggtactgaaaggtgcacaaccaagtgacactgtacgtaacattctttctcgtgaaggagtttacatgaagaaacatcttctgggcggtgtagcaaaaggcgcattcggagaagcagaagctgaagctaaattcgaagcttggaaaaacaacaaacagtcaggtttggctactttgaaggctaaacaagacgaagctaagaaagctgaagcaaaagcacgtctggaagcagaaaagaagatcaacgaagtgaaagcaaaagcactcgctgaaaagaaagctgctgaagctgccgaaaaagctgctgctgaagcacctgcagaagaagctgccgcagctccggctgaagaagctcctgcaacagaagctgctgctgaataaatttcagcagattccgaacaagaaatcaggaaaagctataaatcctctccggtccgccggaggggatttttttattgttttctgctataaaacatatcaaattatttattccgttcagaataaaatgcctttctttgcatcagcatagttcagcatagtgttatttatttttcgaatatgaaacgaattgataaaaaggcaacattcggacaacaggcaagcaaggttacgcaactagcggacgcacttagccaggcgatttccagaaaagaatttcttgaaggagattctttgccttccatcaatcagttgagtgctcaatacggagtatcacgcgacaccgttttcaaggctttccttgatttacgcgaacgaggcttgatcgactccactcccggcaagggttattatgtgacgagccaggtgaccaatgtcttattgctgctcgaccaatatactcctttcaaagaagccttatataacagtttcgtcagacatctgcctatcaactataaggtagacttattatttcatcaatacaacgaacggttgttcaatacgatcctccgggaatccatcgggaaatacaacaaatacatcgtgatgaatttcgataacgaaaaattcagcactgttctcaataaaattaatccttcaagattactactccttgatttcggcaaattcgaaaaagaaaagtattcatatatctgccaggattttgatgaatttttctatcaggcattgaatctgctcaaggaaagattgaagaactatcaccagctcgtttttttgtttcccaaaagcctgaaacatccccaaagcagtaaggtgtattttacccgtttctgtcaggagcaaggattcctctgtgaaatacaggaggatattgagaatctgatcgtacgtaagggagttgcctatatcgccatcaagcaacaagatgtagtaaaagtggtgaaacaaggaagattggaagggctgaaatgcggaaaagatttcggtctgttagcgtataatgatattccttcctacgaagtgattgacgaaggaataacctcattgagtattgattgggaaatgatgggaaacgaagcggccaatttcgttcttaataatgtaccggttcagaagttcttaccaacggaagtaaggcttcgaaagtcactttaattttttttttgcgaagacatcagcacagttcagcacagatattaattaatcctttaatagatagaaaccatgaaaaagtatccgaaaatcgggattcgtcccacaatcgatggtcgccagggtggcgttcgcgaaagccttgaagagaaaacaatgaatttagcaaaagcagtagccgagttaatcagcagcaacctgaaaaacggtgatggcagtccggtagaatgtgttatagccgatagcacgatcggacgcgtagccgaaagtgccgcttgtgcggaaaagtttgaaagagaaggggtcggctctaccattaccgtcacttcttgctggtgctatggtgctgaaacgatggatatgaacccgcattatccgaaagctgtctggggattcaacggcacagaacgtccgggagctgtataccttgctgccgtacttgccggacacgcacaaaaaggccttcccgcattcggtatctacggacgcgacgttcaagatttggacgacaacacaatccctgaagatgtatcagaaaagattcttcgttttgcacgtgctgcacaggcagtagctacgatgagaggcaaatcttacctgtcaatgggtagtgtatctatgggtatcgccggttctattgttaatcctgattttttccaagagtatttgggaatgcgtaatgagtcaatagacctcacagaaatcatccgtcgaatggacgaaggcatctatgaccacgaagaatacgccaaagccatggcctggactgaaaaaaattgcaagacaaacgaaggtgaagacttcaagaaccgtcctgaaaaacgtaaaacccgtgaacagaaagatgctgattgggaattcattgtaaagatgacgattatcatgcgcgacttgatgaccggaaatcccaaattgaaagaaatgggattcaaggaagaagccttgggacacaatgccattgcagccggtttccagggacaacgccaatggacagacttctatcctaacggtgactatccggaagctctgctcaatacttcttttgactggaacggtatccgtgaagcatttgtcgtagctaccgagaacgatgcctgcaacggcgtagctatgctgttcggacatctattgaccaaccgtgcacaaatattctccgacgtacgtacttactggagtcctgaagccgtgaaacgtgtaaccggcaaagagttgagcggattggcagcaaacggtatcatccatcttatcaattccggtgcaacgactctcgacggttccggccaatcattagacgcagcaggcaatccggttatgaaagaaccatggaacctgacggacgctgatgtagagaactgtctcaaagcaacgacctggtatccggcagaccgtgactacttccgtgggggtggcttctcgtccaacttcctgtcaaaaggcggaatgcctgttaccatgatgcgcctcaacctgattaaaggcttaggccctgtcctgcaaatcgcagaaggttggacagtggaaattgatccggaaatccatcagaaactcaatatgcgtacagatcctacatggcctaccacctggtttgtaccccgcctgtgcgaaaaaccggcttttaaagatgtatattcagtaatgaataactggggagccaatcatggagctatcagctatggacacatcggtcaggacttaatcactcttgcttccatgctccgtattccagtatgtatgcacaatgtagaagaagatcagatgttccgtccggcagcctggaatgccttcggcatggataaagaaggatcagactacagagcttgtgcaacttatggccctatctataaataaacaagtttttttcgtcctgtataaataaatattttaactttgccgttcgtagggatggggtcccccacccgacacataacaaatgtcgggatagccccgccccctacagcgacttaaataagtaacactatgattactaacgaacatattgcacagttcattgcacaagcacatcgttacggggatgcaaagttaatgctttgcagcagcggtaacctttcctggagaatcggcgaagaagcattgatttctggtacgggttcctgggttcccacacttggcaaagaaaaggtttcaatctgcaatatcgccagcggcattcctgccaatggtgtaaaaccctctatggaaagtacattccatttgggtattctccgtgaacgtccggacgtcaatgtcgttctccatttccaatcggaatatgccaccgctgtctcctgcatgaagaacaagccggcaaatttcaatgtaacagcagaaattccttgccatgtaggttcggaaatacctgtgattccgtattatcgtcccggctcaccggaactggcgaaagccgtggtagaagccatgcaaaagcataactcggttttactgaccaaccacggacaagtggtgtgcggaaaagacttcgaccaagtatatgaacgggctacttttttcgaaatggcttgtcgcatcattgttcaatccggcggtgattattcagtgctcacaccggcagaaattgaagacctggaaatctacgtattaggaaagaaaaccaactaatatccaggcatattaccatgaaagataccatcaaacacacttatttagcagcagacttcggaggcggcagcgggcgaatcatcgccggctttcttcttaacgacaggctggaattggaagagatataccgcttctccaaccggcaggtcaaactaggcaatcatatttactgggacttcccggctctgttcgaagatatgaaaaccggactaaaactggctgcacaaaaaggatatgccgtaaaaggtattggtattgacacttggggagtggatttcggactgattgacaaacatggaaacctattaggaaatccagtctgttaccgggatgcaagaacagagggaatgccggcagaagtattcaagtgcatggatgaacatcgacattatgccgaaaccggtattcaggtgatgcctatcaatacgctgtttcaactttacagcatgaagcaaaatcaagatgcacagttggaagttgcccggcaacttttattcatgcccgatctcttcagttatttcctgacaggggtagccaataatgaatattgtatcgcctccacctctgaattactcaacgccaaatcacgcaactggtcattcgataccatacatagcttaggtcttcccgaacatctgttcggtaaaatcattcttcccggaacaatcagaggcactctgaaagaggatattgcacgcgaaaccggactgggtgccgtagacgttattgccgtaggttcacatgatacagccagtgccgtagctgctgttcctgctgcagaaagtcctatcgctttccttagttccggcacttggtcgctactgggagttgaagtggacgaacccatattaacggaagaagcaagaaaagctcaattcaccaatgaaggaggtgtagacggcaaaatccgtttcctccagaatataacaggattatggattctgcaacgcttgatgagcgagtggaaagcgtgtggcgaggaacaagattatgatataatcatcccgcaagcagccgaagccgagattgatacaatcatccctgtagacgacaccatattcatgaatccggaaaatatggagaatgcgcttattcattattgccggaatcatgctttgcaaattccccaaaacaaggcagagactgtacgatgtgtgctccagtcattagctttcagatatcggctggctgtggaacagctcaaccgttgcctccccgctccaatccgtcagttaaatatcatcggaggaggatcacaaaataagttactcaaccaactgacagctgacgaactcggtattcctgtttatgcaggtccggtggaagccactgcaatgggaaacattctgacgcaggcaatggctaaaggagaaattgccaatcttcgtgaattgcgggaaattgtcactcgcagcgttacaccacaagtatattatcctaaaaaataaaagtatatggaaacatctaaaaccggttatcaggttcaatcttatgacgttcccgtcaaacgatattgccaaacccttgatttacgcgattctccggaactaatcgccgaatatcggaaaagacatagccaggcggaagcatggccggaaattcttgccggtatccgggaagttggcatcctggaaatggaaatttatatcctgggaacccgactgtttatgatcgtcgaaactccccttgattttgactgggacacggcaatggaacgtctgaacacccttccccgccaacaagagtgggaagaatatatggctatcttccaacaagccgcacccggaatgagttccgcagagaaatggaaaccgatggaaagaatgttccatttgtataatacttaaaaaaataccagagacaaccatgaaacacaccaagcagtccatcatttcgaaagatggcatcagttatcttataccttttattctcattacctcctgttttgcgttatggggatttgccaatgacattaccaatccgatggtaaaggcattctctaaaatcttccggatgagtgccaccgacggggcattggtacaggttgccttctatggaggctactttgcaatggctttcccggctgccatcttcatccgcaaatattcctacaaagcaggtgttttgttaggactgggtatgtatgctttcggagccttcttattcttccccgccaaaatgacgggtgagtactatccgtttctgattgcttattttattctgacctgcggattatctttcctcgaaacaagctgtaatccgtatattctttccatgggaacggaagaaacagctacccggcgattgaaccttgcacagtctttcaacccgatggggtcacttctcggaatgtatgtagccatgcagttcattcaagcgaaattgcatccgatgtgtaccgaagaccgcgcattgcttaacgacagcgaatttcaagcaatcaaagaaagcgaccttagcgtcctgattgctccttatctcattatcggactgattatcgtagccatgttgcttctgatacgattcgtcaagatgcctaagaatggagatcagaatcatagaatagacttcttccctacactgaaacgtattttcacccaaacgcgttatcgtgaaggtgtaattgcccaatttttctatgtaggtgcacaaattatgtgctggactttcatcattcagtatggaacacgcttgttcatgtcacaaggtatggacgagaaaagtgcggaagtactatctcaacaatataatatcatagcaatggtgatattctgtattagccgttttatctgtacgttcattctgcgctatctcaatgcgggtaaattgctgatgattcttgctatctttggaggtattttcactttaggtgtaatcttccttcaaaatatcttcggaatgtattgtctggtagcagtatcggcttgtatgtcattgatgttccctaccatctacggtattgccttgaaaggtatgggagatgatgcgaagttcggagctgccggccttattatggctatcctgggaggttctgttcttccaccgctacaggcaagcatcattgatttggaacaaatagcgtggttaccggctgtcaatgtttcatttattcttccgttcatctgttttcttgtaattatcggctacggttaccgcacagtgaaaagaaactggtaaaatacatatctaaaaatagtgacggtatcacattggtataccgtcaccatctcactcgaatagtgacgccatccctactggatagcgtcactatttttttccttttcacagttaagagttcataaaaacacagaacttgaagtcgtttttttagtttcctttttcgcataccaatcttggcttcttagtattgttgaattatttacatacatttgtctcataccaacagacctgataaacctatgagccaaaaccaagaccctattcatctagcccgccaattcgaaattatatttaccacgcactattccgctgttaaatatttcgctataaacttgctcaaatctgaagaggacgcagaagatatcattcaggatgtgttcgctaaattatggacacaaccggaggtctggctgaaaaacaaagacataggccagtatatctacgccatgactaaaaacacaactttcaatttcatcaaacgcaaaagagtggaacaatcctatcaggaacaattatcgcagaaatatctaatcgaagacttactaaaatccgaagatactctcgaccctatctattataaagaagcactattaatcatccgcctaattctcgaccgccttcccgaacgccgcagaaaagtttttgaaatgagccgcatcaacaatatgagtaatatggagatagcacaagcactcaatatttccgtacgaactgtggaacaccaaatctatctgaccctgctcgaaataaaaaaaactatttttattgcatttttcttgtgtttcttttaagtaatcccccattttcgattgtgctaatagtgtaaccactaaaaagaacagcgcaaatgaggaacttttttcagaaaatactgatattatttaccggcaataactatccggaagctacccaaaatgaattctatcaatggctggtagatgaggatcatgcatcccagaaagaagatgctttgagagagctatggaacaaagcgcaacggcaaaaaaacgtgaaaggaatgcagaagtcttacgaacgcctgaaaaaacagcaaggtattccaaccgtacccaaagagagaagaattcgcccaatacatatatggcaatccgcagctgctatcttattcctcctgcttgcctcttcggtctatctatcgactgtaggcacaaaagcggaaaccgacttgttacagcaatatattccgatagcagaaatgagaagtttgacgctgcccgacggaacaaaagtgcaactcaactcgaaaagtacacttttatatccgcaggagtttaccggagatagtcgtagtgtattcctgttaggcgaagccaacttcaaggttaagccggacaagaaacgtccgtttatcgtgaaatccaatgatttacagattactgcgttaggtacggaatttaatgtatctgcctaccctgaaagccaggaaatagcaacgaccctcatttcaggcagtatccgtgtagattataacaatctgacaacaagtgtcattctccatcccaacgaacagtttgcctataacagaaacaataagaaatatgatctctccaatccggatatggacgatgtgacagcctggcaacgcggagaactggttctgcaaaagatgacgctgacggacatcatcaacgtattggagcgaaaatatccttatgcctttgtatatagtatcaagaacctcaaaaacgacaggttcagttttcgtttcaaggacaacgcaccactcgaagaagtgatggaaatcatcgtgaacgtggtcggacaaatggactatagaatagtagaagacaagtgctatctaacaagaatataactttttaaccttatatgccatgcaaaaaaatacccggaacagaggcctcactccgtcccggatatgaaatctgaattcccaatattagagtttactctacaaattacctcgaaataatttagtcaataacctaatactaagaaaatgctacaaatttataaatttatagtagacaagaagacaaagggaagaagttttatgctttttttctgtttgatgctcgccacaacagtttcccttgcacaaaatggcgctaaagtcactattaaaaagaatagtatatctgtgattgaagcactaaaagaagttgaaagacaatccggcatgtccgtaggctacaacgattcccaactgaaaaacaaaccggccatcaccctcaatatagaggcggcttcgttggaaaatgcgctcgctcaaattctcaaaggtacaggtttcacctatcaactgaaagagaaatatatcatgattattccggaacaaaagaaagaaagcaacccgaccaaaaagatcaccggtaaggtagttgatgaaaacaacgatcccttgatcggagtgaacatcaaagtggaaggcactgccgccggatctatcacagacatcgacgggaacttcctgatcaaagcttccaccggaaatacactgacatttacttatatcggttatacttcaggaagcattaaagtcaccaaccagaataattaccgcattcaactgacagccgatacgcaacagctatcggaagttgtagtaactgctctcggcatcaaacgcgagcaaaaagcattgagctacaacgtccagcaaatcagagcagacaagatgccggaaataaaagacgccaactttatcaacagtttgagcggaaaggctgccggcgttgtcattaatgcttcttcttccggtgtgggaggtgccagtaaagtggtgatgcgtggtacaaagtctatcgagcagagcagtaatgcgctatacgtcattgacggtattccgatgtataacttcggcggtggaggcggtactgaatttgactccaaaggtgctacggaagccattgcggatattaatcccgacgatattgaaagcatctctttcctgacaggtgcggcagcagccgcaatgtatggcagcaacgctgccaacggcgctattgtagtgactaccaagcggggacagataggaaaactgtcggctactttctcaagcagcatggaatttatgaacccatttgtattgcccaagtttcagaatcggtatggaaccggtacacggggcgatgcggaaggttctcccatattaagttgggggcctaaactgaatccggccaaccaaacaggatatgaacccaccgacttctttgatacgggagcggcttacagcaactccatcaccctctcgacaggtacggacaagaaccaaacgttcttttctgccgcagcagtcaattcagaagggatgattccgaacaataggtacaaccgatataatttcacatttcgcaatacgactcatttcctgaatgacaagatgaaattggatgtaggagccagttatatcatacaaaatgaccgcaacatgaccaatcagggagtttattccaatccattggtttcggcttacctgtttccacggggcgataacttttctctagtaaaagccttcgaacgttatgacgaagcacgtaaaatcaatgtggcttactggccgcaaggtgaaggggatttgcgtatgcagaatccttactgaattgcttaccggaacgtccgcacgaatgagaaaaagcgttatatgctgaatgccggactgacatacgacattttggactggctgaatgtatcggcacgtatccgcgtggataacaccgacaatacttatcagcaaaagctatacgcaagtacgatctctacactgaccgaaggtagtacccagggacattacaccatccaaaaggtgaacgaaacacagacgtatgccgacttcatggtgaatatcaataaacgcattgacgacttcacggtagtagtcaatgccggtacttcattgagcgacaactccagtgatttactgggttacggtggtccgattcgcgacacgggagtacccaacgtattcaatgtatttgatttggataatgccaagaaacggacaacacaggagggttgggaagaaatgacgcagtctatttttgccagtgcggaaataggatggaaaagcatgctgtacctgacgttgaccggacgtaacgactgggcttcccagttgaaaggctcgaatcctacttctttcttctatccatcggtaggtctttcggcagtaatcagcgaaatggtgacattacccaaagcgattgattacctgaaagtacgcgggtcattcagttctgtgggtaccccctacccgcgttttctggtacaaccgacttacagctatgaccctaccaaacaggactggaacgccaaaacccattatcctatcggcaaactgaaaccggaacgtaccgactcctgggaaataggtgtggacggaactttcttcaaggatttcaaagtcagtggttcattctactatgccaatacctataaccagacattcgacccgaaaatcaccgtgtcttccggctattcgactctttatgtgcaaaccggttatgtacgcaatctcggtgtcgaggggctactctcttacggacatacatggcgcgacttcggatggaacagtaatttcactttctcctggaataaaaacaaaattgtggagttggttaaggactatgtgcatcccgaaaccggagaaatcgtcaacaaagaccgccttgaactaaaaggactgggatataccaaatttatcctgaaagaaggaggcacactgggagacctgtacacgaatgccgacttcatacgtgacgataaaggatatatccagatagacaaaaatggggatgtcgccaaaacggataatctacctgacatcaaattaggcagcgtatttcctaaagcaaacctggcatggaacaacagcttttcttacaaaggtatttatgcgggattccaattaagtgcccgcctgggaggtattgtttattcagccacacaggctgctctcgaccaatatggcgtatccgaagcatctgctgccgcccgtgaccgtggcggagtactcgtcaacggacgtagctgggtgaacgcacagcagtattacgagattgtagctacctcaagcgggctgccgcaatattatacgtatagtgccacaaatctgcgtttgcaggaagcgcacatcggatacaccatcccccgcaaatggttgggtaatatctgcgacatcaacgtctctgtagtgggacgtaacctgtggatgatttattgcaaagcacctttcgacccggaagcgattgccacaacaagcaatttctatcagggaatcgactacttcatgatgcccagtacacgcaattttggttttaatgtaaagattaacttctaaaactatgaatactcaaatgaaagaatacagaaaagcaaccctccgactggcatacctgctaacgctgatgctatggacgggaagttgtatcgatatggatatcaatcgtaatccttacgagacaacgcaggatgaactgatgcgcgaaaaccatatcatcggctcgtctctaaagagcatggaagcattggtggttcccacacaagagcatctttatcaatttgtggaagcgatgtgcggaggagcctacgggcgttattttggagagactcgtgtgggttggactgaaaaatactcgacttataatcccaagtcggactggctgaaggcttcgttctccgatcctatctcggaaatgtatccttcctaccgggatattatcaaccgtaccaatgaccccgtcgcactggcattcgccaagattctgcgagtcgctatcatgcaccggtctacggatatgttcgggccgattccctataccaaagtattgggagataaaacggaaggtgacggccttagtgctccttatgactctcaagaggaggtttatgtggctatgttcaaggaattggaagaagcagatgaagctctgaaggagaatctaggtctaagtgcggaaggatttaagaaactggataatctttattatggagatgtgcggaaatggtataaataccttcactcgttacagcttcgcatggccatgcgtatcgtttatgtgaaaccggaactggccagggaaatagccgagaaagccgtagccgcaggtgtgatagagaacaatgaggacaacgcgcaactgcatgtggaggagaatcgttcggctctctgtttcaatgattggaaggattaccggatagctgcggaaatcgtttcctatatgcagggatataacgatccgcgtttggaaaaatacttcacccagggaaagtatcaggatgataccgattactatgggctacgcattggtattcttccttccaaagtgacggacgacgagttgatacaaacctattccaaccgtttgatgactgccaatgatacgtatatgtggatgactgccgccgaggtcacgttccttcgcgccgaaggtgccctgcggggatgggcaatgagcggagatgcccaacagctatatgagaaggcgatcaccctttcctttgagcaatggggcgcaagcggagcaagcggatactcccagaataaagcattggtgccgggggcttacaaagacccgagaggtacatacagcgcccaatctccgagcagcatcaccattgcctggaacgaggacaaggagaatacccgtttcgaagaaaacctggaacgtatcattactcaaaaatggattgccatgtttcctctgggcattgaagcctggtgcgaacatcgccgcacagggtatcctaaattccttccgataatggacaacaagggagtgggaatcactaacctgacactgggaatacgacgtctctcctatcctgctgaagaatatcagctgaatgcggaaaatatgctcggtgccctgcgaaagctcaatggagaagataacggcgctacccgcttatggtgggactgcaatccgaatgtaaaataatgtggaacttaaacccaagatacaatgaaactgaattcattcataagtgtcatattgaccgtagcctgctcactgatgttcgttgcctgtagcgactggacagaaccgacaccggttgattacaaccctatatttcccgacgaacaagaccccagcttgcatgaaaaatacgagcaaagtctgaaagaatacaaaaaccggaagcatacgttaatgttaatacgttttgccaacaatccgggtacgacattgggcgaacaggatttcttgcgttccttgcccgatagcgtagattttgtggtgctgaccaacgctgataatctgtccgtttatgataaggaagacatatccaaactcaaacggactggcaccaaatttctctattacaagaatttatccgaattctacgaccaatgcgaagaaacagaaaacctggaagaattcaaaacgaaaatgaatgcggcattgaaaaacggggagagtgatgaatttgacggttattatgtgcagtttggtcgtgccggaagtatgatgcatgtcgatttcttcaatgaggtaacgacggctatccgggaaaaacttgccgctatcggcggtccgaaagctaataatggaaagttggttttctttgatggcatcgtcacatttacagtggattatagcggaagatacgaagagccgttcatcgatttggtagactatttcgtggatgggcaaattgtgttgcttgaaagctcactcgaaataaaactgaatatgagccaacctgtaggtttctatgggaaaatgcccaaagagaaagtgataacgacagccactcctccgaccgatgacggtaaaaccggtatcatcagccgggaagatttggatgttatacaaacctcggaagggatggcctacatcatcaatcatttcatcacaggactgggtaacaatggtccgctggcaggagtttctatctacaatgccaatgaagattatctcgccaccgatggggtgactaactaccgccgtatacgtgatgctatccaaaaactgaacccatcaccgattaattaatgaaaggaggaactatgaaacgatataaaataatcatctctctggctgcaatcatctgcggactgatgattgcctgtgacaatacggattacagcaataaagcaccattcgacaacatggtctatatcaaggaagccagtaacagcaattcagaaagagtgactttccgaaatacgctgaatgaacagaaacgtgccttcagcgccaagttgacttacccggcaggaaaagacatcgtagtgaagctgaaagcggatcccgaactgataaacgaattcaatgcccggcacgggactgattatggaatgctggatagtaaatattatagcctgtcgaacagcgaactgattatcaaagccgaaaagagtgaatcattgattgatacgatctattttaataacctgttagatctggagattgataaaacttatctggttccgctcaccatctctgaaacgtcgggtggcgttcatctattgaacggttcgaaaacattgttctatctggtgcgccgttcaagcgctatcacggtagccgccaacctgaaagacaattatctggaagtgcctactttcctcgacgaagagaaaaatgcctgtctgaaagaattaggtcagattaccatggaagcactggtatatgtagaggactttacatacagcggaccaagcaatacggccggtgcatcggatatcagtacgatcatgggagtagaacagcatttcttaatgcgtataggtgatacaagtttcccacgccaacagttgcagatgcagggaccggacggagtcaaattccccgccgccgacagggctaagtcactgaatgcaatgacatggtatcatatagcgctggtgtacaacgccaaggaacattttattgcctattatgtgaacggacaactgcaaagtcaggatatctcttatggaaaaggagctactgtggatatctgtggaacgccggattgcgaattccagataggacgctcttatgaagatgagctacggcaactcaacggtaacatcgcagagatacgtatctggaacacttgccgtacgaaagaggaaatctggacgaatatgtataaagtggaagatcctgaaaacgaagaaagcctgcttgcttactggaaatttaatgaaggtgagggaaacattgtcaaggaccattcgaaacacggattcgatgcagtatctgccgaacctcttgtgtggccgacgggaatcgaaattccacaaatcaacaagtaatcattcactttaaagataaccatggacatgaaaagaaatataaacttcaaaaatgttctctgcatggctgccattacattagtaaccggcatgctaggaggctgcgaagataattccattgccactcccgtaggtaaattacctaacgagacggctttagacaataactttggcatgctaaaatgtgatatgacaaccagtgacctggaaatcaccatgaccaataccaagactcccgattttgcattcttctaccaaacggtgaagccggtggcacaggacacccgaatcacaatgaaaatcgacctcgacttagtagacaaatacaatgaagaacacggtacggaataccggaaaatgtctactatcagcattgagggcatcagtaacgatggtgcaatgactattaaggcaggagatacaatgtcggatactatcatggtacgcctgaatccgctaggcacattgcatgattattctttgctccctattaccgtagaactaccggaagaaagcggaattcgtccgtcacgggatagtaatgaaatctattacaagatttattataaacgctctacttatccgtggttgagcccgatgaaggctgatatgaaaaagtacaagatggtagggtttattgatggcgaaaaagtcaacgcctccattgccaaagaatttatcatggtattatatgataatgaaacattcggtcccggacattatgagttatgggaaacgtcgtggtatgcctatttatatgacatcattaatgtgaatgccgcaacactgggatatgcgaatggaaaagtgactctgaaccaatcagccaatttcaaaaagcagttaagcaatatgtcgtcactctccagctatggtataaagcgttgcgtcacccttaaagcagaagggaccggcttgggattctgcaacctgacagatgagcagattacagcctttgtagcggaagtcaagaagctcgccaactaccgtgtagatggcattaatctcatggacgaaggtgccgaatatggtataaacggacatccggctgccaatgcgacctcgtatccgaagctcatcaaagcactacgggaatctttaggcaagaccaaactgattacagttaccataacgggtgatccggccggttcactagcctccgaggctgcgggtatcagagcaggtgaatatattgattatgcctggacatgggtaaataccaaaattatgaatccatgggaggatagctcgattgaaaaaccaatagcaggactggacaaatctcaatatggcggtttcagcaccgacgaatatacgttcgattatgaaaatgacgaatcgtatccggaaacgttacgagaaaagttatatgacaaaggtcttggcaaactttacataatgcgtaatatccctttctggtcggacgcactggaagcaacaccatatcatgctaacataaatgcaggggcagcagccttttatagagtggaaggaggccataaatatgaaccggacatcaactatttgcataatggtaaatacaaggatatgaaaggggataaaaactattacgagatgtagaattatcaattaaacaggggaggaaaaacaaatcctttccttactaacaggagcttatgcgcctattatcagtaaaataatataaccggaattttaaccatctatttggttaaagttccggtttcactatttccaccaaatatcatcaattaaaataatacaaaaacacaacacttatcacctacaaaacaacaccaaacaataacaatacaccatttgccaataactcatcatttatttattataccaaatcattacttttactccgcaaaaacaaactatatttcaataaagaaaatatgtttactttaccttaggaattacatatgaaaaagcatattgtgatactgatagccccaaaagattacagtatcaaatacaagatacgcccaccaccgtcaaagaatctctatttagtattatatattcagaaaaaatgatctattaattattgtcacttggaggaaatagatattccttaaagaatgattcaagacgtaaggatttaaatctgcatacggaactcgctttcttaatattgaccttcaaagaacaaataattttgagattagactgtttgagtttagtaatgccctaaatcacactcgttgtgcattttctcatcccccctcaactaaaaaggaacagaggtatacagtccaagtgacctcaacaaaaaataaatatgaaatacttaatgataacgtcactatttgtctctattatagatgcaaatatctttcaccagtctcacttcttcttactacttacagccggaggaatttcattatattggctcttatctcattttcttaccctccataaggaaatcaaaatcttaaaagaagagcaccaatatttcatggattcttttcaaagcattcgcaaccctatcacactcgttcatacccctctaagagctgcttgtgatgatagttgccccgaagacataaagaaaatgttatcactagtcattcgtaatatagactgtcttgatgaacacctaaccaaattaatgaatctgcgacatctgcttatctactccaaacagatggatattgccgaatatgaactgggaaacttcattaataacagagtccattcattgaaaaatttcgctacggacaagcggattaagttagaaataaaaacagagtttaattatgccagcgtttggttcgatcaaagtaaaatctctcccatcattgataaattcataaaaaacgcaatagaacattcgaaacctgaagataaaaggattatcttttcaatttcttctaattccgaacactgggaacttaaaacgttcgatgccaacaagggcaaattgctaacatgttataggcgccaaaagtatcacttgattaaacctaaacataaatcagagttcaaatatgcatttgccaaaagtgtactctgcaaaaaattaatgaaactatgtgatgggaatattcttatcaatcattcaacccacactgtctcactaagatttcctacaacaaattcagaaagaaaggtatccggatataatatcatacactccgcaaaaaagtcggaagaaagaaagactgatacttcattgggtaagattgctcataaaaaaagttcaatcaagcctactgttgttctcgctgacagtaatgaagaattcaagtcttatttggaagaatgtttatcaaaggattttgatgtgaaaagtttcgggaatggctctgaagctttagaatgtataaaagagaaatatcctgatttagtgatttgcgaccttatgctgcatggaatgtatggctatgaactgtcatcaagactaaagacatcaggagaaacatccgttattcctatcatcctttacggttcacgtatagatataggacaacgcaacaaaagagaaagttccctggccgacatctttttatatgtgcctttccacatcgaagatttaaagatagaaatgaatgtacttatcaaaaacaaccgttctctaagaagatcattcttgcagacagttttcggaaagcagttcttggaaaaggaagaagagaaagttttagatgatagtaattacacattcatcaatcaagtaaaagaatttattctaaaaaatatagataaggaaaatctgacgatagatgaaattgcctctgaactgtatatgagcagaactgctttctttaataaatggaaagcactgacgggagaagcaccgaagtattttatttatcgtattcgtatggaaaaagcacgtgagttattggagagtggaaaatactctgtccaggttattcctgaaatgattggattgaaaaatcttaagaatttccgccataaatacaaagagtatttcgggataactccaagcaagtccattacgaaaaagctataaaataaaaagaatattttataattgaagatcccatgaacagggatcttcatggcaatactcatataaaaaaaaatattctatttttatttccttatgcagtatttcacaagtaccggcatttactttatgtacgtacaccttaattttgaaattaataatctaatttaaaacagtatgaaaattataactgaaataaaaaaaacttgttgttttaatcgttttgctttcttagtaatgtcattaggcctgatagccacttttacagcatgtagtagtgatgacgattctgatattcccgtatattcacttaaagatgtggaaggtaattattccggtaatatgctgacagaaactgctccatccgtcaatccacaaaactattccttcaaagaagaacagccgcaaggagccacagttaccgctgaagtaaaagacaatcagattatgataaaaaaacttccggttgacgatctgattaaaagtattgtcggtgaagaaataggcgaaattatcattgagactttgggtgatatcaattacaacattccttatactgcagcctttaatgatgatagcaaaggctccattctacttcaattaaaacctgaacctttggaaataaaatacacgatccctacccaagtacaaacagagggagaggaagctcctcaaattactgtaaaagtaactatagaagcggaagaaaagggtcaatatacatataaagataaaaaactcacctttgtaatcaaagccacccaagtggaagtagaaggagagccgcttgaaaacttttcggttaccacattcagtttcgacatggtcaaaaagtaactgatcggataaactttcccaacgtattttcattatgatgggaattacctccaaaaagagtatgcctgcacacagcgcgcatactctttttttatacctttgtgaaataaccaacgatatgaaaatgactacaactgaaaatatccggaaagaattacaaacattagcagattccaaatatcaggaatttcattcttccctcctcccgggagcaaacaacattctcggcgtacgcatcccccaactgcggacaatggccaaagaaattattaagaaagaagactggcgtacatttgtcgaatcaaccgatacgatttattatgaagaaacaatgcttcagggaatgattatcggactggcaaaaatggaacttgaagaacaaatgaaatacgtaacgatgttcattccccgtatagataattgggctgtatgcgacatattctgcagtgaactgaaaacttctgtgaaaaaaggaaaagaaaacgtatggcaatttatccaaccctatctgaaatcctctaaagaatttgaaatacgtttcggaattgtgatgcttttccattatgtagatgacgcgcatatcgattcgttactgaaatatgccgactcattcaatcatgatgcatattatgcacgcatggctatggcatggatgatatcattgtgttttatcaaatttccccaaaagacaatggagtatctgaaacatagcacactggataactggacttacaacaaggcactgcaaaaaacaattgagtcattccgggtagataaggacaccaaggacattctccgagaaatgaaaagacgataaataccaagcacggcgaacatcctgccatcagcattctgttcaccgtgcttcttatttcttaccgtagataccgcttttattttccacctaatttattttttgtttgcaatccggagaaacactaattcctcctgacctttttccttctgcttctacgtctttgttgtttctgacgattataacgctgccacttcttataaatcatccaaccactcatcaatgcaacaacgacgaaaataagaatagtgatacccactcccaaattatctcctttaatacgcgaccaaatatcaagaacttcttttgtcttatcgccaaaatcacgaatcatggcacatcgttccaccaccttacgatccggatattgtattttatcaatctgcacgctgtctgcacccggtccgaaaaagtaacttaaatcggaataataatgaagagtggtgtctatcttctcttccagtatttcgggagtagctatggaacttacatatccgcagaaatccatattccgcaaggctatatccggacgacacataaagttgataaaataactagccgcttccggattcctggcatatttcgggatcacccaaccgtcataccagatattacttccttcttcgggaacttcataatccaaatccactcctaccgcattggcctcttcaatcgcccagattgcatcaccgctccaagtcatattcagccaagctttatttttcgtcatcatttccttgccaaagtccgcttcccagccagcaatgttcggtttcaaggcttttaagtatttttcagccaactccatcgcacgtggagaatagtcgttcatcaactcttccactgttaccgttccctccttcagttcctttgcatgcgcataaatcacggctgttccataagcatcacgataactatccttcatcaggatctttccggcatactttttattccaaaggcaatcccaggacagggctaccgaatcgggcacataagcccggttatacagaatacctgccgtcccccacatataacatacagcatagcggctggctttttcacccggctgactcaatttattaatctgcttacgaataaatggagccacattattcatgtaattgggagaatgtgcgaaattcgtgtcgataggtagcaacaaatgcttcttcagcatacgctcgatgatgtattccgaaggacaaacaacatcaaaatcttcatgccccttttcaattttcgtcaacatgatttcgttgatatcgaatgtctggtaaacgatacggatattctcaccggtctgttctttataatatgcctggaaatcctcaagtacaccttcgccgatgtaatccgcccagttgtagattttaagaacccgctcacgaggttcaccggaattataacacccggtcaaagccaataagagcaggatagcaggaattattcttttcatattatttacgtagtagcacatttgatagtctattaatcttttttcttcgtttttcctgcccggtaattgattacaaccaataacgccagtaccacgacaaaaatgatagccgaaagcgggcgaagttccggggtcaaacctcccttgcgggcatcggcgtagatataagtagaaagcgtttccaaaccttgattaccgatagtgaatacagttacggcaaaatcatcaatggatagtgtcagtgcaagcataaagccgctaatcattcccggacgaatctccggaattatgactttccacaaggcctgcataggagtagctcctaaatcgagggcagcttcataaatattcggattcatctgcttcaaacggggcaatacacttaaaacaacgtacggggtacaaaaagtaatatgagcaagcactacggttgtgtagccttgtgtgatccccagagatacaaacaaaaggaacaaggatataccggtgataatatcaccattcagaataggaatgctgttcacaaatccgatcgctttgcgtgaacgggctttcagattgaatataccgatagcagcgatgcttcctaataacgtagatgctgttgcagccagtagagcgatagtgatcgtattaatcaatgcattcatcaaagaatgatgagcaccggtagtgaataacgaagaataaagtttggtagaaaatcccgtccagttacccaacactttcgcctctgtaaatgagtagatcacaataatcacgatcggagaataaagcaagagcagcaatatccacaaataagtctgtgcaaatatcttctttaccatagcccgcctccttcatttgagttttccttatcatcggtgctgaacagggaagtagcagctatcaatagcaacataatgagcgaaagtgccgctccatagttccacatactgttattgatattttcctgaatcgtcgtaccaaagagtttgatgttattcatcgtcagcaactcggcaatggcaaatgtcgatatagtcggcatgaacaccatcatgataccactcatcacccccggcatggaaagcggaaggactgctttcagaaagacttgcacaggattggctcccaagtcttgcgccgcctcgatatagctatgatccatcttctgcaaagtattgtagataggataaatcatgaaagggataaagttgtataccataccgaatatcaacgctccctcgcccaacggcacactgaaaaagtcgaataaggcaacagtagcaagggtacgcaccagaatatttacccacatcggcaaaataaacagtacgaccatcgtcttggaacggttcagcttgctgttactcaatatccaggcagcaggataacccagtaaaatacaaacaagggtggtaataatggcaataataccaatcgaatagacaaaggtattgattgcttcgggatgttcgaagaacttctgaaaattggcgagtgtcaaatggccgctatcatcggtaaaggcatatacgacaattaagaacaacggtataatcacaaagatcgccgaaaaaataatgtaagggagagtccaactcttacgtgatgacaaaaagactataaacctcttattcacttcctttcctgttaatcggttattttaactatacgaatagcatctggagggatggtaatacctacacggtcaccgtcatcccatacatcgttcgtatctacaaatacattctcgtcccaatctgacaatacagtcagatgataatggtcacccttgtaaaggatgaatttcacctcacccgtcagcgttccgtcttcttcattatcctgaagaatcactttttcaaagtctacttccactttgacattcgtatcgaaagcgattccttccaccggaacacattcaaagttacagcccaggaattccacatgagtagcatccagcaattttccttcgaatgtattgcaaacacgctctttcttcataatatgaatatcgaaaggcttcaccaacagaccgacttcagcccctacttcaaaatgatggtaatcctgcaccaagaattcatatccgccgcacaacaccgtcatttcataatgcactcctttaaaaatagaagtctctaccactcctactaactgtgccatttccgaaacggggaaaatataaagatcctccggacgaatgactacgtccaccggaacattctcgccaaatccttcatccacacattcaaactccgtaccgcaaaaacgtacgagtttatcatgaatcatggtaccgttgaggatattgctttctccgataaagtccgcaacaaaagcattgataggttcattataaatatcaatcggcgtaccgatctgctgaatctttccttcactcatcacgacaatcgtgtcacttaacgtaagtgcctcctcctgatcgtgagtgacgtacacaaacgtgattcccaaagatttatgcatttctttgagctccatttgcatatccttacgcattttcagatcgagcgctgccagcggttcatccaacaacaacacttccggctcattcacgatggcgcgggcaatagctacacgttgttgctgaccaccggaaagagaatccacatcgcggtattcataatccgtcatgcctaccattttcaaagcagctttcaccttcttctcaatggtctgtttcggtgtttttttcagtttcaggccgaaagcgatgttatcatacacattcaagtgcgggaacaaggcatatttctgaaataccgtattcaccggacgcttatggggaggagtttgtgttatttccatccccgaaattcggatttcgccttccgaagctgtctgaaaaccagcaatgagacgcaacaacgtggttttaccgcaaccggaaggaccaaggatagtcacaaactcgccctttttcacgttcagagtcacatcatccaatgctgttttatcgccaaagtacttcgatacatggctcacctcaatgatggatttatcttcttgcatattcatactaaagtttgggctgcaaaggtacacatttctgcggtttccacctacgtgttaatctaatataacagtgtttttcgatgcccgacagaaaaaaaatctatctttgcataaatatttattcaccaattttacaaaagcatgaaaaagtttacttatttagttattgcaacggcagcgttaagcatggtagcttgtactggcggaaacaaagccggatacactattacaggtacagtagaaggtgcaagcgatggtgacaccgtttatcttcaggaagccaatggtagaaatctgaccaaactagatacagccgttatcaccaaaggtacttttacctttgaaggcacacaagattctgtggttagccgttatgtcacttgtgaagtgaacggagaaccgttgatgatcgacttcttcctggaaaacggaaaaatcaacgttgccctgaccaaggataatgacgctgttaccggtactcccaacaacgatgcataccaggaaatcagagctcaaatcaatgacatcagcaaaaaaatgaatgccatttatgaggcaatgggtaatacatctttaagtgatgagcaaaaagaggccaaacaaaaagaaggtgctcagctggaagaacaatatgacaaagcaatcaaagaaggcgtacaaaagaatatcaccaacccggttggagtattcttgtttaaacaaactttctacaataactctacggacgaaaatgaagctttgttgcaacaaattcctgcgaatttccagaatgacgaaacaatcgtaagaatcaaagagatgactgacaagcagaaaaagactgctgtaggtactcaatttgttgatttcgaaatgcagactccggaaggaaagacagtgaagttgtctgattatgtaggcaaaggaaaagtggtattggttgacttctgggctagctggtgcggtccttgccgtcgcgaaatgcctaacctagtagaaacatacgctaagtacaaaggcaaaaacttcgaaatcgtaggtgtatctctcgatcaggatggtgctgcatggaaagaagcaatcaagaaactagacatgacttggccgcaaatgtccgacctgaaattctggcaaagtgaaggtgcacagctttatgctgtaaacagcattcctcacactgtattgatcgatggtagcggtaagattattgctcgcggtctgcacggagaagaacttcaagctaaaattgcagaagctgttaaataacagatccaaagaaaggcttttccaaaggccttgaaatttatacaagactgtctcaaatagaaaatgagacagtcttttttatttgcgagactttacgccccactctccaaacagataaaaaattcagcccctgtcattctcaaagaatacaggggctgaatgtatgtatgaaagtgagggagatatactcccctacttttactcaagcaattagataaaccaacgtacgtagcagaagtcctgacggtgtggaagttccggattcttcgggaacatacggtaagacaccttgaaactacctgcatttgacaagctgtgtttaacctggaatgtatacaagtcgccttctttcttgactacactgaacggttctacagaataaacatgttgttttccgtctgcagttgtgtaagtagtaaccaattcaagtcccactgcatcattcaagcctttttcatcgataacgtaagtaatagtatattcttttccgctttcgatatcaccattcttcagctcttctaccttgtcacaagatacgatttcaatagaatcccatttagcaaccacatcttctttccaagctgcgatttcttttgcttttgcattatcgttagcagccaaagtctggaaacgttttgccagtttgcaatagaacttgctatagtaatcatccaactgacgcttcatggtataatgaggagcaatctgtgcgatagaattcttcaccactttgatccagccttcagaatatcccttcttattacgtgcataatacaacggaaggatttcagtttcaagaatactgtaaatagtagcagcatccagctgatcctgatgttcctgattctggtaagtacgtttttcagtcaacgcccaacctgcaccttcacggtaaccttccagccaccatccgtctaatacggagaaattgacaacaccgttcatcaaagccttttcacccgatgtaccggatgcttccaacggacgagtcggagtattcaaccagatatcaacacctgaaaccagacgacgggccaattgcatatcgtaattttcaaggaagataatcttacccaggaattccggacggcgagagatctcgataatacgcttaatcaaaccctggcctgctccatcgtgcgggtgagccttacctgtaaacaggaattgtaccggataatcaggattattcacaatcttagaaagacgctccaagtcggtgaacaacaagtgtgcacgtttgtaagtagcaaaacgacggccgaaaccaatcagcaatgcattcggattgatcttatccatcagtgaaacgatacgggaaggatctccctggttcttcaaccatgtatcgcggaatgacttacggatatagtcaaccaacttattcttcatagtcatacgagtcttccaaatctcttcatcgggcacattgtagatagcttcccaaatcttaggattagactgatcgaaccagaagttttcgttgaaatatttaaagtataattctttccattctgttgcactccaagttgggaagtgaacaccattcgttacatatcctacgtggctttcttccgggaaataacctttccagatagaagagaacatttcttgagaaacttttccgtgcagccagcttacaccgttcacttcctgtgaagtgttacaagcaaaaacagacatacagaaacgttcgcccttgtcgcccggattgttacgtcctagatccatcaagtcatcccatgagatacccattctggaaggataaccacccatatatttgccgaacaaaccttcgtcaaaatagtcgtgacctgcaggcaccggagtatgaacagtataaagagaagaagcgcgaaccaactcaatagcctggtcgaaagtcaatccagtagctacatagtcgcagatacgctgaacattaatcaatgcagcatgtccttcattacagtgataaacatctttcttgatacccagagctttcagagtcaggataccaccgatacccaacaagatttcctgtttcaaacggttttcccagtcaccaccataaagctggtgagtgataggacggtcgaattcgctgttcatttcattatccgtatcaagcagatacaaagaaatacgtccaacattcacacgccatacgtttgcatgaacaaaataatcaagataaggaacgtcaactatcaacggctgaccattggcatccattacgcgttcaataggaagttgaccgaagttctgtgcctcgtagttggcaatctgctgtccatccatagacaacgtttgagtaaagtagccgtaacgatacaagaaacctaccgcacacaaatcaacattgctgtcggaagcctctttcagatagtcaccagccaatacgcccagaccaccggaatatattttcaggacgctgctcaagccatattccatgctgaaataagctatagatgggcgttgctcatccggcttcacatccatgtaatctctgaatttcgtataaacttcattcattcttcttagaatcaccttgtcttttgccagcgcttccagcttctcatagctcatacgttccaacaacagtactggattctgtccacattctttccaaagttccggatctagatctctaaacagttcagtcgcttcaaaattccatgcccaccaaatgttgcgtgcgatttcagacaacttctccaactcttccggtatacgtgatttcacagtaacctctttccagttgggagtattcacattactaactttgattttcataatgttttcgtttacttattgataaataatttctttcttaactcaactgacgtatccttgccttacgcaaagcgatatcataagcttcataataatattgtataaagtgcttccataaagcctgctctgcaacttcagcagcacgcttacggatttccttcacctctttatcagtcttatccgcaaacaacgtaatcgtatctttgataccatccgccacttccgaataattatagtccgaacgatgcagcacttccactccatcattaatgccatgctggttcttcaggctgtttacccaaagtccgaatcctgccagatccgtagtgattgtcggcacatggaaagctacactttccagcggagtatatccccacggttcgtaataagaagcatagacactcaaatcctgccccagcaatatatcataatattctttattcatgataccatcacgaccatccagataacaaggaacaaaaatcacctttaccttatcttccggacgattgcccattcccagatatttcaacatgtccaacacctggtcatgagtcatattatgcagccaatgagtgataaacggtacttcgaggggagtgtcgaacttatctttgctcttcaaacgtgcctgcaaatcctcgcgaggctctcccacccaaccgggtacattgatgaatgccaacacattcttatgcagtttcttatccctgttcaagcggtttaatgattccaaaaaaacatcaatacctttattcttaaactcatatcgcccactggttccgacaattaacgtatcatcacccagatttgttcccaataatttattggcaacactaagcatcaaggtacgtgcgcgcttacgcttgccggtaaacgtgcttcctttcggcacaaaatcatcttcaaaaccgttcatcaaaacaacatctgccggtttatccagtaattccttgcattcattattggttatttcactcaccgtagtaaaacagtctacataatgtgcagtctgtttctcaatcgagtgtttcgattgcatgttcagttcctgcgccatctggtcgccattataagcaaacagatagtcatacaacggcttattattgccggcaatggaacgaccgatagacgtagcatgggtcgtaaaaatagtagcaacctccggcacagcttcctgtacataaagtgctcccattccagtcatccattcatgtgcctgatataccaccttatccgtttccgtcaggttgtagcgatagaaactctccaccactcttcctgcggcataggaaaacatagaagcctcgtcgtaatcgccataggcgtgcaacgaatctacttgataacgattccacatttctgtgtatatatcgtctttcttttcaaaaaaaggttggaaatcaacaagaatgactatgggttcaccggggatattccatcgtcccacacggacagaaagttcgtctttctcaagcgcatgctctttccaggcagcacataggttatccgactcgatgaatagagggttctcctttccttgccacacatcaggacctatgaagaagattctgtcgcggaatttttcctgtaatgtatttgcccgtgtcgacaagacggtatatatccctcccactttattacatacttcccagctggactcgaagatataatcgggggttaataaatcttttaccatataatatattaaaactctttttagtatgcgagtgcaaaagtacacattattctttgaaaaataatactttatacaaaaaatatgagttaagaagaggaaagaaacgttgtctaacaatgaaaaaagaatatccccttgcacatgcaaagcagcatgtacaaggggattgaaagtcctttatagaaaatattcttgctaaaaattatgcaacgagtgcgctaccaatcaagaaggttgcagccaaagcaacgattgcatagagttcggggaatacggcaagaatcaacgtattgctaaatacattgtgtccctgtccgattgctgcgataccgtttgcacaaacttgtccctgacggatagcggagaataaagcaaccaatcccagagcaatacctgcaccaagcactgctgatgcctggataggtgtaatttcaggagtcaaaataccgaagattgtctgaaacatgaaataacctgcaaaaccataaagaccctgtgtacccggaagagctgtcaataccaggaagttaccgaatgcactatcattcttcttcaatgctccgatagcagcattacctgcaatagttactccgtaagcactaccgatgcccgacaaaccaaccataatcgcgatgccaatgtaggcgataaacaaattcatttccataatcttattctattttttattgtttaattcttaaaatattaattctcaatttctaattcttaatcttcaaattttcaatttctgaacggtttgtactctttaccgcctccttcatatccggagttcttgaagaactcaacgaacgtcagacgcatcgggtgaaccattgcacccagcacattcataaagatattgatggcatgaccgataacgaaaatcagtaccataacaatcgggcctgctattacattatccggactcatacctactgccaggctgttgaatactcccgccaaaatacctccggaaagtccgagggcaaacagacgaacgtaagacaatacatcgccaagcaaaccggtgaccatattatatgaatcccataatcccagtccgatattcaggaaaacattctttcccggactgttataaaggaagatcatagcagccgaaacacccagaataaccaaatgcactgtacttcccatcggcattacctccggcaacaaagccgaaactgccattgaaaccagcaggatgatccatccgatagttgccactgcatatttaaaaccaaactgaatcgtctgattcacagctttcagcaccataccgaataaaatctggatagctcccaatatcaacgataattggaacatatcattattatccatcatgacagcatgtttcaagcgttgaacaatcggccaatccaaattgtagatgttcgctccgaagaacgtaccagtcagcaaaccgcagaagaacgttgataccgccaaaacctgtatcaatgagatgattgatttcatagacggggttactttcttcgccatcaaccgataggccgtagctcccaggaacaggaacaaaccatatccggaatctcccagacaaagtccgaaaaagaccataaagaacggggcaaagaacggagtcaagtccaattcattatacttcggaagcatatacaacttacagatcggttcgaaccaggcaaagaatcccttattattcaatcgaataggaacattatcgcccggcatcggatcggtaatctcataatatacatgtgcgtcattcaagtaagcctctatttccacttgactgaatgcaggcgcccatccttcaatcaacatcagtttgtcaccggcagtttgttcggaacttaacaccaccttagagaactcaatctggctttgcaactctttcagagcagccttcaaggaaggaatttccgtttcggaaagcgtaaccagcttcttttcattctcttcaacggcctgttcggtcgtattgtaaagcgtttcaaggtgtgccaaagagtatgcaggtaatttcgcctgttctacatccaaatccacttcctgcccgcctttcgtcagagtcacgaagaatactttagaagagatacggttcacaatcattgcattgtattccgtttcccactcttccttgtaatttccttccgaacagctataaaaaccgattacataaccggcatttttcagcttctgaacattatccggttcaaagttaccccaggcttccagcgcttctttctctttggcatagctttgcaactgctgcaacagctttccatgctctgtttgcagggcatccacttcgtccagcacttgcataccacgggcagccgttccaccttccgtagcaattacagcattcttttcatgcttctgattctgaagcaacttcaaggtagccgccaagcgattggaaagacgaatattctcctgcaactccgtgttatcagcagccccctgttgtttctccacaatatggactaccccaagttcacgcagactgttcaggaattcttcatactctttgtgataaaccaggaatgtgagtttcttcatttttgtaatcatgcctctacctccttccttttttcttgatgggacttcatgatcttttgcgaagatttcgacaagttttcttcatcttccatgaatcgtttgatctttcgcaatgcatcctgataacccggtatctgcaccttctcaaaaaggttcaccttttgagtggtctttttccttgcatgttctaacaagttcagcttggcgagcataaattcacgttcaattgccgtatgagccagctcttccaatagatggataccgtcggcataccatttgggagcattaaacatactgtacggacgtatctcgaattctacattttcgagcaacggtacgcgcacacctgcaatctttttcacgccaagatgaacatcattcacctttattaatgaagcgtcaaactcattccaaagggcgaacatggcttcataggcttgaatttgttgttcgagcctatcctccagatcggcagcttccgttttacagcgtttcacttccatgcggagggcgctttccttattcttaatgataggaagcgtacgcacccgcactttcagttgcttttcgagctgctgaagagaggttttgttatattgaaactttatagccatctcgttgatttactaatttaacaatttacgatcagacgattgaaattacttcttataaacatatataatccgtccactatcatcctaatagcaaatcgtctaattgtctaattattttatttcggccagtattgatccaccaagtctttcttgatattcacttcttccggacggaaatatttaccgaacaagccccaggcaacgtccagcatttcagtagtatcaagattgacatcaatagccaacaactgattggaatagtccttcgcaaaagccaacgtacgttcgtcgtagttggtcaggtcgaaaccattttccatcttcgtcttagcgttagcggcatcggcatacagacgtacagcggcattcatcacttgcggatggtccttacgtgtcttcttaccggttaccagctgtttcaaacgagacaatgaacggaacgggtcaacaattaccttaccgatatcactatcacgacgcaggaacaactgaccttcagtgatgtaacccgtattatcaggtacagcatgcgtaatatctccaccagacaaagtagtcaccgcaataatagtgattgaaccaccggaagggaactgcaccgccttttcgtaaatctttgccaaatccgagtaaagcgatcccggcatagagtctttcgaaggaatctggtccatacggttagatacaattgccaacgcatccgcatagctcgtcatatccgtcaatagcaccagcactttctcattattatttactgcaaaatactctgcagcagtcaatgccatgtccggaatcaacaaacgttctaccggaggattttcggtcgtattcatgaaactcacgatacggtccagcgcacctgcattagagaacacattcttaaagtacaggtagtcgtcattcgtcatacccatacctccgaggataatcttatccgtttcagcacgtaaggctacatttgccattacctgattaaaaggctggtcggggtcggcaaagaacggaatcttctgacccgataccagtgtattgttcaagtcgataccggcaatacccgttgcaatcagttccgacggctgtttacgtcgaaccgggttcacagacggaccgccaatttccacttcctgtccttcaatgtccggacctccatcaatcggatcaccgaaagcgttgaagaaacgtccggccagctgctcactcactttcaatgtaggcgatttgccgaggaatactacttcggcattggtcggaataccctccgtaccttcaaatacctgcaaagtgacatcgtcaccggcaatcttaaccacctgtgccagtttaccgtccacagtggcaagctcgtcataccctactcctgtcgctttcagcgaacaagtagccttggtaatctgagtaatcttggtatatatcttttgaaaagcttttgttgccatctttgataattaaaattataaattaaagattatgaattgacacttctttcggcaatcaattccttcagttgtttctggaatccttcatactgttccgatttgaacttcgagtagttcatctgcttacagacattaatcatcttcttgaagtaatccattacttcgttgaagttatcaaagtcaaattccgtatgacagatgtcgattatcatgttcagaatatcttcctgacgttccatcggagttaccgcatcaatttcatcaaaagcatcctgttgcagaataacaaagtcaatcaattctgatttccagaaaatcacatgatattctaccggtacaccatcatcaccgaggatattgatctgttcggcaatttccttaccgcgctgtaaacgggttttcagttcgtttacctttccaatccattcatcgttgatatgacctttgatatactcctcaaattccgggtattcgatatattttgaataagaatcaatcggattcactgccggataacgtttcttatccgcacgatcctgttccaaagcataaaaacaacgggctactttcttcgtattttcagtcaccggctccttcaagttaccacccgcaggagataccgtaccgataaacgtaatagaacccgtttcgtcattacttagttttacatatcccgcacgaccgtagaagttggagataatagccgaaatatccatcgggaaagcatccggcccaggcaattcttccatacggttggacatctcacgcaaagcctgtgcccaacgggaagtagaatctgccatcaacaagactttcaatcccatggaacggtaatattccgccagtgtcattgctgtatatacagatgcttcacgggcagctaccggcatgttggaagtattcgcaatgatgatagtacgttccatcaacttacgtcccgtatgcgggtctaccagttcggggaactcggtaaagatttccaccacctcattggcacgttcaccacaagccgcaatgataacgatatccgcttccgcctgtttagagatagcgtgctgaagcactgttttaccagtaccgaacggaccggggataaatcctgtaccaccttccacaatcggattcagcgtatcaatcacacgtacaccagtctccaataatttgaaaggacgcggtttctccttataattcgtcatcgcacgtttcacgggccatctctgaatcatagtcacaggaatatcatttccttcttcgtctgtcaggatggcaattgtatcttctatcttataatcaccttccggcatgattgtttttacggtagccgttcctttcatagtgaacggggccataattttcagcggctggaagttttcatccacctgtcccaaccatgcagaagcctgcactttgtcacctacattcgctaagggtacgaagtgccatacacgttctttatccaacggatatgtatattgtcctcttttcaagaaaactccatccatcttgtcgaggtcattttgcagaccatcatagtttttcgatagcatacccgggcctaatgtcacctcaagcatgtgtcctgtaaattcggcttcggcgcccactttcagtccacgtgtgctttcaaacacctggacatatacatgtgaacctacaaccttaatcacctccgccatcaacttatcaccaccggtcgagatataacaaatctcattctgagctaccggtccgtcaacgacgagggtcaccatgttggcaataacgccactaacagttccttttgttgccatatattttttttattttattatctgaattctgcaggaatctgcacttcgttcttcagcgattcgataatgcttctgaacaactgattacctctttccttatccagtgaaatccaccgttcaatcatttccagcttcagcaggaaagtgaaaatacgttcgatagtgaaatagtcgaagaaaatagcatcctccatccaattccaccgcaaagcatccaacttcttctcacgctccaccagttctgtaatctcactgattttcactaacgattcaaacacatccacctcaccggacaatccgaaatcgcgggcactcgatgtacgcaatgcttcgcatacttccgtatttcccacaacgttggaagcaatatcccatttgaatttacggctagtaaatgcaacaagaatattattgatgttcaagttgaattcaaaccaggcagaaacgaacttattcccacagttcatcgcatactcataatatagagcagccagatgatcctcgtgtaaaaccgtactttcagccggagtattcagataatcagtaataaaagtggatagatagaccggaaattctttaggactgatttctccgccttctctcagaatagaaatatattcagagagttcgtcagcagagtagtttccccgtttgtcgatttccgcttctttatctttgagaagtttcagcacatttgcattatcaaacttcagataaaacaagtcaatcaacttctggtctgaagcagacaatccatcgtagatttcagttttaaaatcggctactgtatagctcagtttgctgtcttccagcgaaagttccggcaaacctgctaccaagtaatagtacttactactcatagtcgcttcttttaaaatagcatttctactaattgaggacgcaagaacgctttgaagtaattcatgaattcttcttctccgaagttcaccttatacgaaccgtccgccggagaaacagtgaacagagttttgataccatttacttgctgaatggtcacccccttgtctaataaagcttttgcatgagctgcaaaatactttttcagcgattccgcatcggctgttgagatgacgataggttcatctatgctccatttggatgccaatgctacgataaacgcattcaggtaatctttatcctgagcgaaatctttcacggaagcggttatcaacttatcagttaccattgtagcgatttctgatttgagcgcattcacagcctgaccggcgaatagttttaactctgatttagtattttctgctaactcatcagcagatttacgagaggagtttacaattgattctgcctcttttcgggcatcctcaatgattttcttagcttcttcctgagcattcgcgataagtctctgcgcttcctcgtttcctttttccacgccttcacgataaatcttatcggtcaactcttgaattttgttttccatattaacaggagtatttagtattattactatattaactatgtatcctttgtcagattctcgccaaatttacaaaaatcaatttgataaaaaagagaaagaagaaaagaaaaagatttgtttgcaaaaaaatcacagtcctacacctattttattccgctttttccccttttttattactaaatgacacatttaccgaatctttcaagccggtaaacaaatataaggaatctaaaagacatttggaaatatgtatatacttaaaacgacaaacaggatactaatacaagattaaataacaaaagctatcggtatttcaccaaattcatagaaaactaaaacttcggggagatctattcgacaatgacttacggaagactgaagattgataattttcgcaaagtaccaaatgccagaaagccccttgactcagaatgaatcaaggggcttcttaaaaaacggcggctacctactctcccactgttacgcagtaccatcggcgtgacgaggcttaacttctctgttcggaatgggaagaggtggaaccctcgtgctataaccacctgaagaaggttatgacatgatgaaaagtaaaatcatagtgtctagcaagctaaacgtatatacccaaccggtacatgtccgaaagaaagtgaacgggcaattagtaatgctcggctttgatgttaccacctttacacctgcatcctatcaacgtcatcgtctttgacgaccctaagaaatctaatcttgtggctggcttcgtacttagatgctttcagcacttatccaatcccgacttagatacccagcaatgcacctggcggcacaactggtaaaccagcggtcagtccaacacggtcctctcgtactagtgtcagagccacgcaaatttcatacgcccacgatagatagagaccgaactgtctcacgacgttctgaacccagctcgcgtgccactttaatgggcgaacagcccaacccttgggaccttctccagccccaggatgtgacgagccgacatcgaggtgccaaacccctccgtcgatatgagctcttgggagggatcagcctgttatccccggagtaccttttatcctttgagcgatgtcccttccatacggaaacaccggatcactatgctctagtttcctacctgatcgacttgtctgtctcccagtcaagcgcccttatgccattacactctacggacggttaccaatcgtcctgagggcacctttagaagcctccgttacacttttggaggcgaccaccccagtcaaactacccaccaaacagtgtcctcgtaacaacgagttagaactcaaataatcaaagggccgtatttcaacagcgactccacaaatactggcgtacctgcttcaaagtctccggcctatcctacacatcaattacccaaattcaatgttaagctatagtaaaggttcacggggtcttttcgtcccatcgcgggtaatcggcatcttcaccgatactacaatttcactgagctcacggttgagacagtgtccagatcattacaccattcgtgcaggtcggaacttacccgacaaggaatttcgctaccttaggaccgttatagttacggccgccgtttactggggcttcaattcaatgcttctcttgcgatgacatctcctcttaaccttccagcaccgggcaggtgtcaggctgtatacgtaatctttcaatttggcacagccctgtgtttttgttaaacagttgcctggacctattctctgcgcccaactctcgttgggaccctttatcccgaagttacagggtcaatttgcctagttccttaaccgtgaatcactcaagcgccttagtatattcaacccgactacgtgtgtccgtttgcggtacgggtaccttaaagattaagtttagcggattttcttgggagtatgcttacacgcgctattaccttattccgaagaatttggtatactatcaggttcgactcttatcccggatttgcctgggataatcaacatctacacccttcaacggactattccgtcagtccgcggcgctgtcactcctccgtctccacgtcactccttaaggtagtacaggaatattaacctgttctgccatcggcctcaccgttcggctgagccttaggacccgactaaccctgatccgattagcgttgatcaggaaaccttagtctttcggcgagggggtttctcaccccctttatcgttacttatacctacatttgcttttccacacgctccagcaaagctcacgcttcaccttcgacgcagagtggaatgctcccctaccgatgttagtgtttagttaacatcccatagcttcggtaaattgcttgatgcccgattattatccacgccaaactcctcgactagtgagctgttacgcactctttaaatgaatggctgcttccaagccaacatcctagctgtcttagcaatctgacttcgttagttcaacttagcaattatttcgggaccttagctgatggtccggattcttctcctttaggacatggaccttagcacccatgccctcactcctgggatcgaactactgcgcattcggagtttatcaagacttgataggcggtgaagccctcgcatcttatcagtcgctctacctcacagtagtaattcccaaggctgcacctaaatgcatttcggggagtacgagctatctccaagtttgattagcctttcacccccaccctcagttcatccggaagcttttcaacgcttatcggttcggtcctccagttagtgttacctaaccttcaacctgaccaagggtagatcacttggtttcgcgtctactccttccgactaatcgccctgttaagactcgctttcgcttcggctgcggatctcaagatccttaaccttgccggaaaaagtaactcgtaggttcattatgcaaaaggcacgccgtcactgctgaagcagctccgaccgcttgtaggcgcacggtttcagggactatttcactcttctattcgaagtgcttttcacctttccttcacagtactggttcgctatcggtctctcgggagtatttagccttaccggatggtcccggcagattcacgcaagattcctcgtgtcccgcgctactcaggataccactacgcttcatttagcttcgaataccggactatcaccgtctatggtcccattttccaaagggttcttctcactaaatttcttgcgacatcgtggtcctacaaccccaatattgccgtaacaacattggtttgggctaatccccgttcgctcgccactactaggggaatcattattattttcttttcctacaggtactaagatgtttcagttccctgcgttagcctcttgctatgcaagatgtcattccttcagaatgacgggttgtcccattcggaaatcttcggatcaaaggttatttgcacctgcccgaagcttatcgcagcttatcacgtccttcatcgcctccgagagccaaggcatccgccatgcgcccttgcttactttctttcaaacgttttattctcgtactggtattggtagtggaattgcttccttctatcaatattgcgtactcgaacacgtacggtttgatatatacttttagctcttactaaaattttactttttgtacatcatgtcaaagatcgtttctctttttcagagatcgtggagaataacggattcgaaccgttgaccctctgcgtgcaaggcagatgctctagccagctgagctaatcccccaagaggttattcaagaattttgttttttagcttttagcttttagctttcgctgttcctcattcttgagcttggtagtcccaggcagagttgaactgccgacctctacattatcagtgtagcgctctaaccaactgagctataggactagttcaaccttgtctacctttcgtctagactcggcttcttttttctcttgtttatctctatctatacttctatagatggttgatctatatgttataaataaacaagtaccagtagtacaaaaaacagaacctttaaagtctctaagtggctgccacgttttgtgacagttacggcatcgctccagaaaggaggtgttccagccgcaccttccggtacggctaccttgttacgacttagccccaattaccagttttaccctaggacgctccttgcggttacgtacttcaggtacccccggctttcatggcttgacgggcggtgtgtacaaggcccgggaacgtattcaccgcgccatggctgatgcgcgattactagcgaatccagcttcacgaagtcgggttgcagacttcgatccgaactgagagaggtttttgggattagcatcctgtcaccaggtagccgccttctgtaccccccattgtaacacgtgtgtagccccggacgtaagggccgtgctgatttgacgtcatccccaccttcctcacatcttacgacggcagtctctctagagtcctcagcataacctgttagtaactaaagataagggttgcgctcgttatggcacttaagccgacacctcacggcacgagctgacgacaaccatgcagcaccttcacaacagccttacggctatactgtttccaatatattctgttgcaatttaagcccgggtaaggttcctcgcgtatcatcgaattaaaccacatgttcctccgcttgtgcgggcccccgtcaattcctttgagtttcaccgttgccggcgtactccccaggtggaatacttaatgctttcgcttggccgcttactgtatatcgcaaacagcgagtattcatcgtttactgtgtggactaccagggtatctaatcctgtttgatacccacactttcgagcatcagtgtcagtgacagtctagtgagctgccttcgcaatcggagttcttcgtgatatctaagcatttcaccgctacaccacgaattccgcccacctctactgtactcaagactgccagtttcaactgcaattttacggttgagccgcaaactttcacaactgacttaacaatccacctacgctccctttaaacccaataaatccggataacgctcggatcctccgtattaccgcggctgctggcacggagttagccgatccttattcatatggtacatacaaaattccacacgtggaaaactttattcccatataaaagaagtttacgacccatagagccttcatccttcacgctacttggctggttcaggctcgcgcccattgaccaatattcctcactgctgcctcccgtaggagtttggaccgtgtctcagttccaatgtgggggaccttcctctcagaacccctatccatcgtagtcttggtgggccgttaccccgccaacaaactaatggaacgcatccccatcgataaccgaaattctttaataaaaatatcatgcgatattcgtatgccatccggtattaatctttctttcgaaaggctatcccggagttatcggcaggttggatacgtgttactcacccgtgcgccggtcgccatcttcagtttgcaagcaaactaaaatgctgcccctcgacttgcatgtgttaagcctgtagctagcgttcatcctgagccaggatcaaactcttcattgtaaaagtattttttatcatcggttaagatgatctttttgctctgttcaggacgccgtaaatttattgaccttattcaaatacctattagtcttaactgtatcgctactgaataagacaagtattgacggttctatttttttacttgtactacttgtattgtttatcaatatttcaaagaacttgctgctttcgttttaaaagcgggtgcaaaggtaaaggctttatttttaactaccaaactttttcggaagtttttttattttttctttttactcatttctcaggctctctatgcgaaagggaaagaatgtataaaagaaaaacaaaggccgttttctttgcgaatcggactgcaaagataagaactttatttattataatccaaaacttttcggaagtttttttgttcttttctttaagtgagattccactttttcactaagtcaatttgtcaaggctttcttctcttggaaagcgggtgcaaaagtacacccttttagtatacaatccaaatatattaaactattttttcgaagttttttttgaaagaatctgctaaaacgctgaaggataatgatgttgtagaacatattttttcaacagtagagaaaggggcatgagaatgagcaaagaaacaaaagtaataccagacgctttgaaagaacttaaaaaaagcatagctttagagagcgtaaagcgtagctttagcactcgtaaagcactgctttagcattaacaaagcactaccctgttaataacaaacgggtacagcaggtacactttttcgaggctctatcacacacgcacacgcgcgctatataatgcccttatcacctgcattgacaaacacgctgtatgcaatcaagcgtttcaatcaaatgagtgcagtattattcctaatttatgaagagagaaagagcaacaggatataaacaacaagaacagcagagagctcgcaagatgaggtaaggtcttataaaattagcaagaggaaccgcaccaaaatttgtttcattttaacgggtaaggaacaaaatctagtgtggatgaacttgttcaaacctgtgtggaaatgaatgaaaatttgttttcaattactgattcgcataagtagaacatgaacttttgagtcataagttccaccagtttcaccttatctctgaaacatcgatggataaggagatagcgggtgaaagcgtagaaaaaatcaaggtgaaatctcccgttattgctttcacctttcaaatttatttacaccgattgctggacatatagagccaccgtattgaatgtatagattcaacgcggtaagtatatagatacaatgtgttgaatatatagatctgccaactcaagtgttagtagataataatcaaggtgttaatacttgacatccatactattaactcctgatagattatctgttaatacctgacagtggatttgctataagcatattttcattagctataatgatatccggattagctataatgaaattagttttagctcaaggaatattttgaaaagacaaggtgaaaccgataatgttcagttttgcctgaatttgccacttgccttcacccgctatctccttattcatcggcatttcgacaatcaggtgaaatcgatgaacggcaatgatcttatagtggcatttattatactttattcattaagaaagaggtaagttacacggtgttccgttatcaaatgattcagaaccgtgcggaaataaaacaaacttttggtgcggttgccctatttgtcaatagaaaccacttagtctcaagcggtactttctatacctattatacgcacgcacgtgtgtgtgagaaaaatatgcagtgtacctactgtaccttttgtacccgccgggctgttcataactttttttgtggagggtagctctcacctggttgacatctgaaaaatatcctcctgcatttaccagccagtctcatcccatccggtagccgaataccattgcaaagtcctaaaataagtattccattttaaatacctagtatccggtatataacacccgatacccgaatatatatccgaatctatattcaccaatttataatcgtcaacatagttcttatatataactaccctttccaattgctcttcaaaatcagaaggaatattattatcagtcaattcacgcataaaagctcgaaaatcatatgccgaatgatccaaaggagacctcccataaccataatgggcttgaaaataatctatttttctattatcaaacttaaccagattgtcctgatactgtttcataattgaacaagtaatattcgccaatgccgatatttcattcgtttttatcaccgcaatagtaccccacgaataactatattcatttttatagtaatcaataaagtcctttgcgacatttatagcattctgctctgagttatccgcagacaataaatatttcgttatcttgaaatatggaaaacccgcactcataacctctgcaggagaaagaattaaataatcagcagtatttcttaattcataagcaacctcaacttgagacattaaacaagcgtcaaataatatataatcaaaatgaatacctgattgttctaaagctttcgataaatcaggaatatgaattttagctccattgtcgtcaccaaaagaacggctcttactatagtccgcaggcaaccatccggtagcatgagaacccaaaatcagactatacttttcagctggacagtaagcctccacatctttcaatacattaattatcacctcatttgatactgaattctggctactataagtttttatcacttctcttttactgacagaacctttgccatccacttcatacttaaacagagtcgggacaggaaactcaccttttctactgccaccatcccaataaattacaaatgtaccaggagacgtaacttcgctcaatcctcgttcaactgatgctatattgttatatatatcattactgatatcattgtctccaacaagatacatcaagactgtttttaccgttactggaacaggagtatcatcatcaccacaagctgataagaaaatcgacaaacatacgaacaaaagcgataatattttaatctttttcataatattcctcatttataacagggacaaagataaaaaaataagagatgcaaacctgcatctcttattatattaacaattaagttattgcttattactcttccggtttcgtaaagtggaatttatctgaatcaatccgcgataccgtcattctattattcttcttatatttattcagaatcttcgttgcttctttttccaacttctttctgttttccgagaagtaaatcatacatgtactattctgctgcagttggttatcctccagataatttttcaactgataactatataattcacgatgagccaagaacccttctttgctaaccttcgcactatctaatatctgaatatccgtgaaatagactaccgtatccgtaaatgaagcagaaattccaaaagcataaaccggtttagaatggtcttttttcagagaaaaagcggagcacatggtaaacacaagtgcaattgcaaatagtatttttacgtatttcatatcatataatttttaacttcgcaaaggtaacaaaaaagaagagactacctcgatttatctcaaataaatagtatttcttaatcataaatccataacaatacaggtttcttttctgccttgagcaacctgtcaaccttcctcatcacctcatcagatatcacaggacacccttgactgattcctaatggaagatgcaaaggatacacctccatttccggcatcggagtataagaatgtaacacgatataccgtttaaaagcattgttattcgtcacttccaatccatgcaatttataatgaacattaatcccccacttactatacgaccgtatccctactttatattttcctaaagaagagcaataactaccttccacattactgaatacaggcttggacagcgtactgtttttcccgtatccatgcgcacaaagacttgcatacttcacagaatctcccttgaaatcccatacaaagaaacgccttttaccagaatgaatactgaaatctaccagaaagcaataatttgtattacacccgttcttatcacaataagcctttcctgcctgtgctttttcccgcaaacgctgctctactttaacaggcaccgaatcagaagaggatgccgcacattttgcatacgccaccatccctgctcccaaaacaataagaaccaatgatattaaaactgactttttcataaaactcgcatagtataagattgaattatagaatggggcttatgtaaaaagtcgcataagtacattcttctatatgaaaagtgcgacttatgcgactcaaattcttttttctttcagaaactgatattccttacttatcccaagtaagatttgagcaatttactacgattactttgtctaagtcttctaattgctttttctttaatctgacgaacgcgctcacgtgtgaggccaaatttatcgccgatttcttccaatgtcatttcttgctgtccgataccgaaaaacatctgaatgatttctttttctctatcggttaacgtagaaagagctctatcaatttccctcgcaagagactcattaaccagagagcggtccgccattggcgaatcatcgttaaccaacacatccaacaggctgttatcctccccttccacaaaaggcgcatccaccgaaatatgacggccggataccttcagcgtatcagagattttatcaaccggaatttccagttcgtctgccaactcctcgggagacggacgccgctcgttttcctgttcaaacttcgagaaggctttgctgatcttattcagcgaacctacctgattcaacgggagacgaacaatacgcgactgctctgccaatgcttgcagaatagactggcgaatccaccatacagcgtagctaatgaacttaaatccacgtgtttcatcaaatttctcggcagccttaatcagtcctaaattgccttcattaatcaagtcaggcaaactcaaaccttggttctggtactgtttagccacagatacgacgaaacgaagattggcacgtgtcaatttttccaatgctacacggtcacccttacgaatgcgttgagcgagttccacttcttcctcgacagtaatcaggtcttcacggccgatttcctgcaaatacttatcaagagaagcgctctctctgttagtgatacttttggtaatctttagttgtctcattctttaaaaacagatttggagtgcaaagttacgacaaataatttgttaacatacaaaattaagtaacttttacactatatttttcatctaataaaacaaaaagagatgccgacaagttgattggcggcatcctttttctatttcattagcttatcctgcaatcttcttaccttatttttatatattactcttgagtcagatcgacagcgaaatatccgcgtttacctgatgggaacacaccggtcaggaataatacctggttcggagacttaacagcagctttcattacttcttccagatcgctgactttgcgcatcggctggtcattagctttcaggataatgaagcctttacgaactcctgcatctgacatcttaccggaagaaactcctgtcacttgcagaccgtaacctagattcaattgcttcttcaagtcatccggcaactctttgaaagcagctcccaggatttccatgcctgcatccttcacgatcttggtagtaccttgctcgttcttcaacgttacttcaacggtcttttccttcttatcgcgcatcagttttactttcaccttatcacccggacgatgtttagcaagtgcttcttgcaagtcagccatattggatactttcttattatccacaccgataattacgtcatcgactttgatatcagctccggcagcagaaccattctctacgatttcagaaacccatactccttctacaacacccagttctttagctttatctgccaatgtcttaccggatttgtcaatcggttgacggtcgtccatcaaactgctaccgatagagccaccacgaataccgagcaatgcacgttgtactgttccatattgtttcaagtcggcaattactttcgtcataatgctggtcgggatagcaaaaccgtatcctgcataagcacctgtcggagaagaaagcactgaattgataccaaccaattcacctttggcatttaccagtgcaccaccactgttaccctggttgatggcagcatccgtctggatgaatgattctataccaccattatatactcccagagaacgagcttttgcacttacgatgccggcagttacagtagagttcaaattgaacgggttacctactgccaatacccactctcctactttcaacgcttcggaatctcccaccggaatagtcgggaaatcatcaccctcaattttcaccagcgcaaggtcggtgctggggtcagtgccaatcacgcgtcctttaaattcacggttatcattcagtttcacactgatttcatccgcaccttcaattacgtgattgttcgttacgatatatccatccttcgagatgattactcccgaaccaaaacctacacgaggttgagactgtacctgacgttgctgtccgcgtccatcaccaaaaaagaaatcgaaaatgtccggcgcttgctgaacagttcttgttttagcttcttgagtagaccttatatgtacgacagcatgaagtgaattctcggcagcctgtgtcaaatcaacaggttgagcgttcacagcgtcaaaagcagccaatttgacattgggattctgcttgaacatctcattaaaagatgtttcttttgcagattcgttagattgcaacaatttgtaagttgtcaatcctgcaactcctgagctaagaagaatgattgctcctactcccagaatgttctttgttgtctgtttcatgatttataattctttaaattgttaatattcgacattgttttaacttttacgacgttaaaataataacaaatatcgttcacttattctacttgtcactcttttttgtccacttttaacagagaatatttggagcttaacagcggttaacgacaacacctgacaaatttacattcgttgtatgtcagatggctttaacactctgacattcattcagtaaagtcagattttcatgacaccgattccaggtaagtcattcagagtgatctttcctttcaccacttccacccctttaaagcgatcattagagataagcaggttgccatccaggtcggcaaaatccactaatggcgagaactgtgaagctgcagaaatagcacaggaagtctctgtcatacagcccaccatgacacgcatgccgagtgcatgagccaatgtcaccatcttccatgcttcacgcataccggtacacttcatcagctttatattgattcccgtgaaagcgccttttaaagcggctacatctcccagacgctgcaaggattcatccgcaaatatcggtagcgggctctgttgtgttatccaggcaatatcctctagcttctccttaggcatgggctgttctatcatcacaacgcctttttctttcagccaatgaatcatatcgagcgcgtattggcggtctgcccatccttgattggcatctatcgctatcggaaggtctgttaccgaacgaatggtttcaatcatctccttatcattgtcccgtcccagtttcacctttaatatattaaactgatcggcacactcttttgttttcgcccgcactacatccggcgcatcgatgcctatcgtaaaggtagtggaaggtgtcttttctttgttcaatccccatatcttataccagggagcgcctaatagtttccctaccagatcatgaagggcgatatctaccgcagctttcgctgccgtatcctttggcgagaggctgtcaacgtatgacaaaatgtcatctagctgaaaaggatcactaaactgttccagattcactttcccaaggaaattcatcacagactctactgtttctcccaaataaggaggcatagaggcttctccatatcccgtcacgccttcatattctatttctacctgcacatcgggagttgttgtacgcgaataagtggcaactgtaaacacgtgcctcaacttcaattcataagggaaaaaagtcattttcatcttccctcccaaaccgagcttatttatatgaatggtagaaagcaacgattctccggctagtgcctgacgggctactaaccccgaactgaaagcagccaaagctgccgttttcaaaaaatctctcctgttctgcattcttttattgataaaaggggttcttatttgtggtattcattcctttctccttatttatataaggtaagaaacggacagcaaaaagtaaacgcttcgtgttgaattcatcatagttttgatccgaaggattcatgctgctgacgtgcacatctcccaatgcgtggataaactgcttgtttccgaggtaaatgccgacgtgagaaataccttctttacgttccgcagtcgctttccggccgaaaaacaccagatctccccgtttgacattagagaagtcaggagcaatatcgatatgttcgcccacataggcctgttgagaggcatctctcgggataataatgtcatgcataaaaagtacggtccgtaccagtccgctacaatccactcccttggaagaggttcctgcccatagataaggaattcccatcatcgagtaagctgtttcaatgatactttcaacatcttgtttcagtgaagctcgccattccgcttccggttgggaaatggatttcgaaagatatgctttccgtccgtcgggataagacacttgatagaaatgtcctttgctcccctcccacttcaaacgattgcccgcaacaacatcggatacgggttgggaactctcatccggtttctcatacgcaaatccgtagtgcgaggtaaccactatcttttctgcccgattccattcatcataccgttctttcgacatgggggtaattaccatccggtgcacccatccggtataatcatccggtgtttgtatctcgtaccaaccgttatactgaagcaccttgaccggcattcccaacaatgcctgcgtactcatgccggaagtaaatttgccttcctcgcgcaaattgcaaactgaaatatgtactaccccataagccgaatcggcaggcatgggacgtatttcctgtgctttcaggctagctgccatcatcgccaggaaacaatagaaaaggaggatattcttcttcattaaaatccattttaatgatagcaaagttagaaattatttctatttgtgatactttctttggctaaaacaaaataaatgacgtatttttgcagtctaaagcagttggccggtctgtcgcgtgcatgtttcgtgcaggaggaaagtccgggcaacatagagcatcctacttcctaacagaaagctgtccgcgagggtagagtaacgtagaagaaaataaccgccgctcctttcggggagaggtaagggtgagaaggtggggtaagagcccaccagtcgcatggcgacatgcgggctgtacgtcttaggagttgtaaggtcatgtaaaccggcgttatgagagttgctcgctccatgtcggagggtagaccgctaaagtgtcgtggtgacacgccactcagataaatgacaggcacctgatataattaaagattaataattggaaattatatgggtacagaactcggcttataggctgactgctttttcttttaattatccatttaattacaaatgactaatggatgaggatcgactgttcgagcaagtctgttgtaatcagtaattagttgcttgcaattagtaattagcgaagaactatgaagaagaaaatcaccgatatatggaagtttcttacgtatgacatctggcgcattacggaagacgaagtgacccgaaccaagttctcactctacaatattataaagaccgtctatctttgtatcaatcggtttaccaaagaccggatggccaataaagcttctgcacttacttatagcacattgcttgccattgtaccgatacttgccatcctgtttgccgtagcgcgtggtttcgggttcgacaacctgatggaacatcagttccgcaacggttttggaggaaatacagaaacaacggaggccattctctcatttgtcaattcctatctttcacagaccaaaggaggtattttcattggagttggtttggtaatgttgttatggacggttatcaatctggtcagtaatattgaaatcaccttcaaccgtatctgggaagtgaaaaaagcacgatccatgtatcgcaagattacggactatttctccatgttcctgctgatgccgattctgatcgtggtatccggaggactttctctgtttatgagcaccattctcaagcagatggatgatttcgtcctgctcgctcctgttatgaaattcatgatacggcttattccttttgtcctgacatggctgatgttcaccgggctgtacatcttcatgccgaacacgaaagtgaaattcaaacacgctctcattgcaggtattctggcagggtctgcttatcaggcttttcagttcctgtacatcaacagccagttgtgggtgtcaaagtacaatgccatttatggtagttttgccgcacttcccttattcctgctttggttgcagatatcctggacaatctgtttgtttggagccgaactgacgtatgccggacagaatatccgcagctttagctttgaccaggacacccggaacatcagcagacgataccgggattttatatccatcctgattatgtcactcatagccaaacgattcgaaaagaacgaaccgccctatacggctgcagaaatatcggaggagcatcagatccccatccgactgacaaatcaggtactttatcagttacaggaaatagaattgattcacgaggttgttaccgacgaaaaaagcgaagaaatcggttaccagccttcaatggatatcaatcaactgaatgtggctgtcctgctggaccgtttggacacatacggctccgagaatttcaaaatagacaaagacgaagaattcaacgacgaatggaaggtgctgaccgaatccagagaagaatactataaaaaagcaagtaaagtattactgaaggatttgtaggaaagtcaaaccttaaatcgcgagaatgaacttaacacaatattagaaaaaatgaaaaagctactgctaagtgcatttgtcatctgtctagcagggacaagcattgcacaagaatctcctttatggatgcgccactgcgctctttctccagacggaaccaccattgcatttacctacaaaggagacatctacacggtaccgtcaaccggcggacgtgccacacaaatcaccaccaatccggcttttgatacggaaccggtatggagtcccgacagtaaacaaattgcctttgcatcggatcgcatgggaagtctcgacgttttcgtcgtatccagtgaaggaggagcaccccagcgactgaccactcattcaggcagtgagaaacctgttgcctacaaagacaacaaacacattttattcacagccaacattgctccctctgccgaagatgccgggtttccttccggccagttccagcaagtgtacgaggtagccgtgacgggaggacgccccgctatgttctcatccatgccaatggagtgcatctctattaataaggagggagtgatgctctatcaggacaagaaaggatacgaagactattggcgcaagcatcaggtatcccctattgcccgtgacatctggacatacactcccgggaaaaaacctgtttatcaaaaacaaactactttcggaggtgaagaccgcgaaccggtatggagtcctgatggtaaatcattctattatctaagtgaagagaaaggttccttcaatatattccaacgtactcccggaaccaccacttcccaacaaatcactttccatacaaagcatcccgtacgttttctaagcatttcaaccaccggcacactctgttatggttatgacggcgaaatttatacacttactccgggcaaacaaccccaaaaggtaaatataagtatcctggcagacaagaatgacaaagatattatccgccaaatcaaatccaacggggctaccgacatcgctgtatctcccaaaggaaaagaggtcgcattcattatgcgcggtgatgtttacgtaacctccattgactacaaaacaaccaaacaaattaccaacacacccgatcaggaacgtaacatcagtttcgctcccgacggacgcacactcgtctactcttcagaacgcgatggattgtggcagctttacacttccaccatcgtacgcaaagaggagaaacaattcacctatgccacagaattgaaagaagaacgtttgacaaactccaaagtcgcttctttccaaccacaattcagtcctgacggtaaagaggttgctttcctcgagaaccgtaccgctatccgtgtcatcaatctaaaaaacaaggctgtgcgcacagtgatggatgccaaatatcaatattcttatgccgacggtgaccaatggttccaatggagccccgacagccaatggattctatcagacttcattggcataggaggctggaacaataaagacgttgttttgctgaaagccgacggaaaaggcgaaatggtcaatcttaccgaaagcggatacagcgacagcaacgccaaatgggtgttgggcgggaaagcaatgatatggaacagtgaccgtgccggataccgtagccatggtagctggggaagtgaagacgacacctatattatgtttttcgacgtcgatgcctacaaccgcttcctgatgagcaaagaagatattgccttacttgaagaagcggaaaaggcagagaaagcagaaaaagaaaaaaacaagaaagaaaaggcagagaagaaagaagacactaaagacagtaagaagaaaacgaaccagaatgagaatgcgaaaaaagacagtacagagataaagcctcttacattcgatttggagaatcgttttgaccgcatcgtccgtctaactgtaaattcttcccgcctgggtgacgctgtcatgagtccgaaaggtgatattctttattacctggcagcttttgaaggagactacgacctttgggagcataaactgaaagaaaatacgactaaaatattattgaaaggagttggcggcggctcactcataccggataaagaaggaaagaatatctttatgtgcacaggcggccgattgaagaaaatagagattgccggtagcaaaattacaccgatagaatttgaagcattcttcgattaccgtccttatgatgaacgcgcatacatcttcgaccacgtttgccaacaagtaaatgacaaattctatactgccgacttgcatggagtggactggaaaggatataaaaaagcatacgaacgcttcttgccccacatcagcaacaattatgacttcacggaaatgttgagtgaattgcttggcgaattgaatggttcccataccggagcccggtttgcagcaggaggcagcgcaatgcctaccgctactctgggagtcttttacgatgagtcatacgacggtgccgggttaaagatcaaggaaatcatgaagcaaagtcctttcacgcagaaaaagacagaagtgaaggcaggttgcatcattgaaaaagtagacggcacaacgattgaagccggtgctgattacttcccgttatttgaaggcaaagtcggacgcaaagtagtacttaccgtatacgatccttctactaaaaaacgttttgaagaaacagtaaaggcaatcagctatggaactcaaagcgagctgctttacaaacgttgggtagagcgctgcaccaagaaagtggaagagctttccggcggacgcattgcttatgtacatattaaaggtatggacagccccagcttccgcaagatctattccgaactgctcggccgttatcgcaataaagaagccgtagtggtagatacccgtcataatggcggcggatggctacacgatgatgtagtcaccttacttagtggaaaagaatatcaacgtttcgtgccacgcggacaatatatcggcagcgatccattcaacaaatggctgaaagcctcatgcatgctaacttgcgaagacaattacagcaatgctcatggcactccttacgtatataagactctaggcattggtaaactggtaggcgccccggtggcaggcacgatgaccgccgtgtggtgggaacgccagatagatccgtctattgtattcggtatcccgcaggtgggttgcatggatatgcaaggcaactatctcgaaaatcagaccttgcaacctgatattctagtttataacgaaccggcagccagcctgaaaggagaagatgcacaactgaaagcagcagtagactacctattgaaagatttgtcaaaaaagaaataaatatagcattattgatgccgccggaaaagcggcatcaataacacgctaactatcaacaccttaaaaaagccatttattggttttaaagaaacaggtcgttcctttaaaaggaaagcatcgttggtttaaaaggaacgtccccttcctttaaaaccaacgatgctttctgttatatgcttatcctaaagggctaagaatataattatttttcaatcaataacgattgtatgaaatcaccttttctttcggcttccttatcttcttacgtttttcctttgccggatagccaatgacaatatccagcaataaacgtttcgaagcaggaataccgacaagctgtttcagctctttttcatcgaaccaacccagaatacaagaacccaaaccttcggcttcagctgccagagaaatatgagcagccactattccaatgtcgatcaacggaaaatgcttgccttttacctttccgccaagcagggaggttatattagcagattcttctacaaccagaatatgcacgggagcatctttggcaaacttattcattcccaagccagcagcagctttcccggctttttgagccagttccttgtctgtgatgaccacaaacctccaaggttgtgcgttgcaggccgaaggagccaaacgtgcagcttcaagtacccgttccaacttttccggctccaccggacgttccttatcatacgaacggtcactttgacgagcctgcaccaattgaagaaaatcagtatatgccatttccaatcctccggtcacttatttatattttcttatttatattgaatcatccggctgatatacttgccgataatatcgaattcgatatttaccacactgccaatctcaaacgtatggaagttcgtatgctcgtatgtataaggaatgatagccacctggaaagtatcatccgtcggattacataccgtcaggctaacaccgttcacagtcaccgaacctttatccacggtgatatatccgcgtttcgccatctccttgtcaaacgcatatcggaatgtaaaataccagctgccttccgcatccttaatatcgatacaagtagcagtctgatccacatgtccctgaacgatatgtccgtccaaccgaccgttcatcatcatgctacgttcaacgttcaccttatcccccactttcaacaaaccgaggttagaacgctccaatgtttctttcatggcagtcaccgtatacgtatcatccgtcagagtcactaccgtcaggcatacaccattgtgagaaatactctggtcgattttcaactcattcacaaacgaacacttaaatgtaaagtgtatattctcctggtctttcaccagtgctaccaaagtagcatattcttctacgattccagaaaacataattctatttactatttacgattttacaattgaaagtactctcttaatgcaagggtcaaagatacgaataaggaagcagcttagaaaataagagcaaaaaaaaatggggcttttcacaaagctccatttttcagttttcaataggtattagtttttttttaaggtaaaaagattgttttcaggataacggtgcaaatataggcggttttaccgatactatccaaattataaaacatgtcatataacatctttttgaaaattctttggatttattatcatttgaagcaaaatctcctgtaacttgtccgttacaggagacaaatataagatatttttttaaggagccctaatttctgtttaaaaatcggcagaaaattacttttccgggtaattttcatcggtttttccacgatgttttaacactttggcatcaatgaagaatacaatctcctcggcaatgttggtaatatgatctcccgaacgttccagtttacggaacacgctgactaaatctacgcaagtatgtacagcttccggatgttcgataatatagtctgaaagaatccctgttgcatccgcattgatttcatctagcaaattatccttagcaaacactcctgccgccaaatcattactctcttcattcaaggcacgttttgccagttccagcatcgacaacacctctgcctgcatctctgccaggcgaagacgagacaacagctccgcatccaataccggttctttgcaacgaagtacaaaacgggcgatcccttccgcaaagtcacccaaacgttccagatttgtgttaatcttcaacatagccaacacaaaacgaagatcaatcgccaccggattatacaatgcgataatatcttccacatcactatctatcttcaattcaaaagcattcaccctgcgctcgcgaaccatcacctgttgagccagctccttgtcaagggtcaacacagcctctccggcacggtcaagctggttgtacaccaaggtccacatttcatcaatttccttcttcaataggatgagttccgattctataaactttaccatagtctattatatataaatgattaatattctatcaattgggttccagatacccggattacccaaaacgtcccgttatgtaattctgggtagcctctttctccggattggtgaatatctttttcgtctgatcgaactccaccatttctcccatatagaaaaacgccgtcttatcactgacacgggccgcctgctgcatattatgcgtaacgattacaatcgtataatccttcttcagttcatgaatcaactcctccactttcgccgtagaaataggatcgagcgcagacgcaggttcatccatcagcaataccgaaggagagacagccatcgcacgggcgatacaaagacgctgctgctgtccgccggacaatgcataagccgattccttcaacttatctttcacctcatcccaaagagccgctcctttcaatgtttcctccacacgctggcgaatgaaagcattatcttttattccgttcacacgaagtccgtaagccacattctcgaatatgcttttcgggaaaggattgggacgctggaacaccattcccacattcttgcggagttcgtccacttccacgcctttcgcatagatattatgtccgtcgatacggatttctccctccagacgggtagcaggaatcaaatcattcatccggttgaaaagccggaggaaagtagatttgccacaaccggacggtccgataaaagcaacaaccgatttttcctcaatctgcatgctgatgcccttcaatgcatgaaagtccccataccagaagttcacatcacgcacatctattttcactgtatccatatactaatttagttcgtttttactcttttctcaaaatactttctcaaggcattagccagcagattcaccaacaggataatcataatcaataccaatgccgtgccataagccagcggcagttgtgcctccatatccgttccactggtggaaatcacatacaaatgataaggcaaggccatacactgatccaaaatgccggtaggaagttgcggcaggaaatatgcggcacaagtaaacagaatcggcgccgtctctcccgaaacacgtcccaaggcgagaatcaacccagtgataatgttcggcatacccatcggcaaaataacatgccatatcgtctgcaacttcgtcgctcccaatgcccggctaccttcacgcatactgtcgggaatggctttcaaggcttcctccgttgtccggatgaccaaaggtacgcaaagcaaacctaatgtcaaagaacctgccagaatactatcaccaaaccccatataattgacaaacagcgccataccgaacaatccgaatacgatggaaggaataccgctcaagttattggtcatcacccggataaagcgtaccaacctgcctttcggcgcatactcattcatataaatcccactcatcacccctatcggaaatgcaaatagcgcacttcccaccatcaggtagaaagtaccgacaatagccggccagataccgccacctgtcattccatccgtaggagccgaagtgataaaatcccaactgatagcaccgattcctttataaacgataaatcccagaatcgcaaacaatatcagtacaatgcaaagacttaacaaccggaaaatcccgaaagcgagtttctgcgaacggtgtttagctttattattactccgtatttccatcttatttgctacgttttaatcctttagaagaaatatattccacactaaagttgataatcaatgttatgaagaacagtacgacacccaacaggaacaatgcctgatagtgcggaccacccgcaggagcctctcccagttcggcggcaatcgtagccggaatggtacgcaaaggctcaaggatcgttgtcggaatcacagccgcattacctgtcaccatcaatactgccatcgtctccccgatagcacgtccgatgccaagtaccacaccagatgtaatacccgaaatagaataaggaattactaccttatatatcgtctgccattgagaagcccccaatgccagactcgcttcccgcattgcacgcggacagttacgcatcgcatcttccgtcaccgttatgatggtaggcaatgccataatggccagtacgatactccctgccaggccgctctctcccaccggaagattaaacaacttctgaatcaacggaacgatgacaatcaacccgaaaaagccataaaccacggaaggaataccactcaacagttcgataatcggtttcagccagttccgtactttcgggtttgccacttcagacatatagatagaaaccgaaagcccgaacggcaaagcaaaaaggatggcgaacagactcacccacaacgtaccggtaatcaacggcaggaagccgaattgagctgccggagtggccgtaggaaaccattcggcacccgcaaatacatctttcacggaaatggtgttatcctctatgaaatgcaccgcgtccggatgaacaataaacttctgcggaacaaaagctacgatacccggtgttttctctaccagttccgtaatcttgtcgcctgcatattcataagcaggtcccaactcctcttccgtacaatattgcgttatatcctccaaacgaaaaacccggatagggagatcttccccaccgagttccttccagtttgtaatctcctcatcaaaaacatcctttatctgtgcagggctcaacacactaactttgttactcttattcagcgccaacacatatccctcttctatcaccttactcttgaacaacccgaaagcttccgtgaaaaggaagagcacaatcagcagaatagtaatacttgtcacgaaaccgctacaagtcaacattccttctataatcctttcaaatacctttttcatacctactatgatttctgatgcaaagaaagcgtctctttattaaggaggtgtgactaacgtttgaaggaaatgtttcaatcatgttacgtttgtgttacaagtatcatttccattccggatgaaatggaaatgtaatatccgattgcttaatttgcaaagtcaataaaaagaagaaatatgaaagtgagaagaaacttattaatcgccctttccttactctcgctcggtgccaacgcacaacgtataaaaggtagcgacacggtactgcctgtcgcacaacagacagcagagcggtttatgaaccagcatccggatgcccgtgtcactgtaaccggtggcggaaccggtgtgggtatctccgctttaatggataatacaacggacattgcaatggcttcccgcccgatcaagttcagcgagaagatgaaaattaaagcggcaggagaagaagtaaacgaagtgattgttgcctacgacgccctcgccgtggtggtgcatccctctaatccggtgaaacagctgacccgccaacaactggaggatattttccgggggaagataaccaactggaaacaggtaggcggagacaaccgaaaaatagtagtctactcgcgtgaaacatcgtccggtacttacgaatttttcaaagagagcgtactgaaaaataaaaactacatggcaagcagcctttccatgccggcaacaggtgctattatccagtctgtcagccagaccaaaggagccatcggatatgtaggactggcctacgtgtctccccgtgtcaaaacgctttccgtgtcttatgacggaagctactacgccacccctacgatagagaatgccaccaacaaaacctaccctatcgtccggccgctttactactattacaatgtaaaaaataagcaacaagttaaccccctgattcagtttattctttcatccgacggacaggacattataaaaaagagcggttatattccggttaaataaaaaaaatgtcctacttttgtagcctaaatacagataacattaaccgttatgacagatattaaaaacgaagaagcaggcgaaaagaaaagcttgaactttattgaacaggcagtagagaaagacttgaaagaaggtaaaaatggtggaaaagtgcagacgcgtttcccgcccgagcccaacggctatcttcacatcggccatgccaaagctatttgccttgatttcggcatcgcagaaaaacacggcggtgtatgtaaccttcgtttcgacgacactaaccctaccaaggaagatgtggaatatgtagaagctatcaaagaagatatccaatggctaggctaccagtggggaaacgaatactacgcttccgactacttccaacaattatgggacttcgctatccgcctgattcaggagggaaaagcatatatcgacgaacagagttcggaactgattgcacagcagaaaggtactcctacccaaccgggtgtggaaagcccttaccggaaccgtcccatcgaagagagcctcgaactttttaagaaaatgaatagcggtgagatcgaagaaggcgccatggtgctccgtgccaagattgacatggctaatccgaatatgcacttccgcgatccgattatttaccgtgtagtgaaacacccgcaccaccgtacgggtactacctggaaagcttatccgatgtatgacttcgcccacggacagagtgacttcttcgaaggagtgactcattctctgtgtacacttgaatttgtggtacaccgtccgctttacgacctcttcatcgattggttgaaagaaggaaaagacctgaacgacaaccgtccccgtcagaccgaattcaacaaactgaacctaagctacaccctgatgagcaaacgcaacctgctcacactggtgaaagaaggattggtaaacggatgggacgacccccgtatgccgactatctgcggtttccgccgtcgcggttattcaccggagtccattcataagtttatcgataaaatcggatataccacttacgatgccctgaacgacatcgccctgttggaaagctctgtccgggatgatttgaacagccgtgctacccgtatatctgcagtaatcaacccggttaaattgattatcaccaactatccggaaggacaggttgaagaactggaagcaatcaacaatccggaagatccggaagcaggaagtcacctgatcgagttcagccgcgaattgtggatggagcgcgaagacttcatggaagacgctcccaagaaatatttccgcatgacaccgggacaagaagtacgtctcaaaaatgcttatatcgtgaaatgcaccggttgcaagaaagacgaaaacggtgtaatcacagaagtatattgcgaatatgacgcaaatacccgtagcggcatgccggatgcgaaccgcaaggtgaaaggtacgctccattgggtaagctgcaaccactgcctgcaagcagaagtacgtttgtacgaccgtttgtggaaagtggaaaatccacgtgacgaactggctgccatccgcgaagcaaaaaaatgcgaagcactggaagccatgaaagaaatcattaatccggattcattgaaagttctgcccaactgctacatagagaagttcgcagctaccttgcctccactctcctatctgcagttccaacggatcggttactttaatatcgacaaagaatcaaccccggataaactaatcttcaaccgtacagtagggttgaaagacacatggggtaagatcaataaataactaagctttcaagcttaactttacaatggggctgtgtcaaaaggatcatcatctgaacttttgcaacagccccatcttagcaattaaaaatctaaaagtaaaatgggtagaaaaaattcgccatcagcaaaaaaggaactagtcacactaatcacaaactacgaagaagcaaaagcagaaaaccgacaactttatctggatgctgaccaattggccgacatcgccgactggtatgcctccgaacgaaaatttgaagaagcacaagaagtaatcacttatggacttaaaatacatccgggaaacacagatttgcttatagaacaagcatatctttacctggatacccaaaagctgcaaaaagcaaaaaaagtagcggattcgattaccgaagaatttgattccgaagtgaaactgctgaaagccgaactattgctgaatggaggaaaactggaggaagctcaatggctgttaagcacaatagcggatgccgacgagctggaaacaatcattgatgttgtatttctctatctggacatgggatacccggacgcagccaaagaatggctcgacagaggtaaatcccgttataccgaagatgaagaatacatggctctcacagccgattatctggcatcgacccatcaggtagaatcagccatcatctattacaataaactcattgacaaatctccattcaacccttcctactggatgggactggtgaaatgttactttgtccaggaacaaatagacaaagccatcgaagcctgtgatttcgcattggcagccgacgatcagtacggggaagcttatgcctacaaggcacattgtttcttctatctgaacaattcggatgatgccatcgagaattaccaaaaggcgattgagctcaaagccattccccccgaactgggttacatgtttatgggaatatcctacggtaataaagaagaatggcaaaaagccgatgactattacgacaaagtgatcgaacgttttgaagaagacggagacaagcagtctattttattgatagacacctataccagcaaagcattcgccctctctcacctggaaaggtataaagaggcgcatgagttatgcgagaaagccaaagagataaacccgaacgagggattgatttatctgacagaaggaaaactatacctggcagaggaactggaagacgaagctgccatctctttcgaaaaagcgatagagatcaatccgaacatagaaatgtggtatatgattgcctctgcttattcggaaagtgactatctgatcgaagcgaaagaatactttgaaaaagtgtaccagataaatccgaaatacgaagatgtgacggagaaattgagtgttctttgcctcatgcacggtgaaatcgacaacttctttaaatataacaaggaatgtgaacatccactggaagaagacatgatcctggatctgttgaacagtcccgaacacagagaagaagacgaaagaactctcaaagaagtgtgggaacgcatgaaaaaagagaataagaaaaaaacaaaaggaaaaaaataaatcaatttataaattctatcctcaaaaaacatggaatcagtagcagaacttcttaaatgggtattagaaaacttgaactattgggtagtcactatttttatggctatcgaaagctcttttattcccttcccctcggaagccgtagtaccccctgccgcatggaaagctatggcagacgacagtatgaatatctttctcgttgtcctatttgcaactataggagcagatatcggtgcattagttaattattacctggcacgttggttgggtcgtcctattatctataaattcgctaacagccgtttagggcacatgtgccttattgacgaagagaaaatacaccatgcagaagaatatttcagaaagcacggtgcagcctctactttctttggccgtcttattccggctgtacgccaacttatcagtattcccgcagggttagccggcatgaaaataggtcctttcctgctttatacaactctcggcgctgctatatggaacagcatattagctttgctcggatacctgatttaccgttttacagacctcaaaacgactaacgatgtctatgtaatggccaccgaatacagtcacgaaatcggctatgtcattatagcagtggtggtaattgtaatcgtttttttggcttataaagggctgaaaaaaagaaaataagtagtaaaatactcattgcaaagccacagaggacgcagagaacacaaagcaagaacatagagttaccggggcatccattattgtaaatcggctattacccgttaaattcttacttctttgtgtattctacgtcctctgtggtttatttttttgtggtagataagagctaattagaaattaaactgaactcctactcccaatatctctttaaattgcacacgagcaccttttgtaccatccttttgcacgattttcacatcatcgtcatacataaggttagtagtaagtgtggttgagaaccatttattgataatcatatttacttgtacttcccagttcacatctatattcagcggcttatgcagataatcggaatatagatccaaacgtgaatataccgtcatatttttcaagaattcatatttggcttctcctttcaagttagcaccgaagctggataatagatgtttgcccggatccactccataagctccttcgtcagagagacggtcattgagtacaaatgttccgcgccacgcagcaggagacaatacaacggtaaatatcttacccggatcatacgtaaagcccaaaccggtagtcaaataggcaggagccataaattcggagatagcaatgtctttattgacggagtagtcatatcctggagaaaactgtgtctggaaagtggcgaacgcactggcataccaacttttggcaatagcatagccataattcgtattcaaatagattttatcatttgctttcctggttccgtcgtcaccggtcttatttaatccataagccagttcgatacgattattccacagatgttttcctttcttataattaatctgataagtgccctgcaagtcaaaggcaacggagttatcacctccggcagcccaattagtgaggctcacttgcgttagtttcagtccggcaaatccttcttttgtccagggagaaatttgtgtactatcggcagtttgggccgacaaggttccaacgcccatacataacagggcgatgaatagagttttcattttgttcatgatagttgaggtttagtgtagaaaaaacacaacctaacaagaacggagccttggcagtttaccaagcctttttaccagttcccattaggtcaaaatctttaagataagtagcaggcttaagtattaagtattagccatattcgtttattagctgcaactaatagttaatacctaatacttaatactccatattctatattactttacagcagctaaggctttgtcataatcaggctcctgggtgatttcaggaacaagttccgtatatgcaattttgccatctttgccaatcacaactaccgcacgcgccaaaagtcctgctaacggaccatctgccatacgcactccgtaactttcgtcgaaatcagagaagcggaaatcagacaatggaattacattttcaataccttctgtcgtacagaaacggccgtgtgcaaaaggaagatccttagaaatagccaatactaccgtatctttcaatccggcagccattttattaaacttacgtacagaagttgcacatacgctggtatccagactagggaaaatatttaaaatcacatttttaccatttaaatctttcagagagaaagaagataaatctgtttttaccagctcgaagtcaggagctaccttacctacttgtataaattcaccgatcagtttcaccggttgtcctttgaaatttgttgttgccataatgcatgtatatttaaaatttactttatataggaaacaactattcccccaaatatgttcacggaaaaccttttctaaattcaatttgttattcctcaacgaaatcactctagtgttcaatttaaaatataaaatgtatggaaactgtattcaatgagattcaacattcagtaaaaaattggtggacttctcttcttttgggaatcgtgtatatcattgtagccctttggctcatgttctcacccgtaagcacctatgtagctctaagtatcattttcagtgtatcgatgctgataagcggtattctggaaatcatctttgctcttagcaaccggaaaggtgtcccgagctggggatggtatatcgtaggaggactcatcgacctcgttctgggtatttacctgattgcctatccgatggtcagcatggaagttatccctttcatcatagccttctggcttatgttccgagggttctcctccaccggctattccatcgacctgaaacgttacggaacccgcgactggggctggtacatggctttcggtattcttgccatcctgtgctctcttttaatattatggcaacccgccataggagcgctctacgcagtgtatatgatttcttttgctttcctcatcatcggacttttccgtgtcatgctttcatttgaattaaagaatctgcataaaagaaaataaaaagctttcggcacttactttgggattttgtttatctttgtaggcaatttacataaatcaattaattaaaaaggaagaaaattatggcaatgcatacatggtttgagtgcaagatccgttatgaaaaagtaatggaaaacggaatgcagaagaaagtaactgaaccttatcttgttgacgcactcagttttacagaagcagaagcacggattattgaagaaatgactccgtttatctccggagaatttaccgtttcggatattaaacgtgccaactatagcgaacttttccccagcgacgaagaaagtgccgaccgctggttcaaatgcaaacttattttcatcactctggatgaaaaaagcggtgctgaaaaaaagacttccacccaagtactggtacaagctgccgacttgcgcgacgcagtcaagaagctggatgaaggaatgaaaggaaccatggcagattatcagatcggtatggtatccgagactccgctcatggatgtatatccttacagcgccgaaccgaatgacaaaccggagtttgatccatcaaaagcataagtaacaatgagtattgctgacaatttaaagcaagtgctggccgaactccctcaaggagtccggctggttgctgtctcaaaattccatcccaatgaagcgatagaagaagcatatcaggcgggacagcgtatttttggagaaagcaaagtgcaggaaatgacagctaaatacgaaagtttgcccaaagacattgaatggcatttcatcggacacctgcagacgaacaaaatcaaatacatgataccatacgtagcgatgattcatggaattgatagttataaactgctggccgaagtcaacaaacaagctgtcaaagcgggacgtacagtgaactgcctgttgcagattcacgttgcgcaggaagaaaccaaatttggtttcagtcccgaagaatgtaaggagatgttgaatgccggagaatggaaagagctgactcatgtacgcatctgcggattaatggggatggccagcaacaccgattgcattgaacaaatcaaccgggaatttggtttactaaataggctctttaacgagataaaaacaacttggttcatccactccgatactttctgcgagctgtcgatgggaatgtcacatgactaccacgaagccattgccgcaggaagtacgctggtacgggtaggaagcaagattttcggagaacgaatttattaatcaggagtaaaaaacatattgctatgaccgatttaaaaactactttcgcagggctttcccttagaaaccctatcattatcagtagctcggggctgaccaacagtgccggcaaaaacaaaaaattggccgaagatggtgccggtgcaattgttctgaaatcactgtttgaggaacagatcatgctggaagcagaccaactgaaagatccggctttctatccggaagccagtgactatctggaagaatatatccgtgagcacaagctatccgaatacctgactttaataaaagaaagtaagaaggtatgccccattcctatcattgccagcatcaactgctacactgattccgaatggattgactttgcaaagatgattgaagaagccggtgccgacgcattggaaatcaatatccttgccctgcaatcggaagtgcaatatacatacggttcattcgaacaacgccacatcgatattctccgccacattaaaaaaacaatcaagatacctgtaatcatgaaactgggtgataacctgacaaatcctgtggcattaatcgatcagttgtatgccaacggtgcagcagcagttgttctcttcaaccgtttctatcagccggacatcaatatcgaaaagatggagcatatttcaggcgaaatattcagcaatgcttccgacctcgccattccgcttcgttggatcggaattgcgtctgcagtagtagacaagatcgactatgcagcttccggtggtgttgccaatgcagaatcagtagtgaaagctatccttgccggtgcttcggctgtagaagtttgtagcgcagtctatctaaatacaaatgcattcatcggagaagccaaccgcttcctctctgcatggatggaacgcaaagggttcaggaatatagctcaattcaaaggcaaactgaatattaaggatgttcagggtgttaatacattcgaacgtacacagttcctgaaatatttcggaaagaaagaataaggaaaaagtatactaaatcaataaagaaaacggtgaacaaattgtgctatttgcaacaggatgttcaccgtttacttttttaatcacttattaatttatctcgcttagcagagaaatctgttataacaggttgcttgccagttcactcaattcacttcgttcacctttcagcaaattgacgtgtgcaaagatattctggtctttcatacgatcaatcatatataccaagccattggactgactatccagataaggttggtcaatctgctggatatctcccgtaaataccatcttcgtaccttcgcctgcacgggtgatgattgtctttatttcattcggggtcagattctgcgcttcgtcaatgatgcaatacatttcgctcaaactacgaccacggataaatgccagagcttcaatcaccagctgctcgcttttctgcatatcttctatgcgcttcacttcggtagagtttgtagcaaactgacgttttatgacgttcaggttatcaaacaacggctgcatataaggagctactttttcctgtgcgtctcccggaaggaaaccgatatccttattggaaagcgccacaacgggacgtgccagcaaaatctgtttgtaatccgtcagcttgcccaaagcagcagccaaagccagcaaagtcttacctgttcccgcttttcctgtcagagccaccagtttgatgttcgggtcattcagaatctcaaaagcaaaactctgttccgcattccgtggttcgattccataattcttacccttcatcacacggataatagaatgggtaaaaggattgtagcgtgccaatacactattccggtcactcttcaatacaaaacattcattgggatgaatcaaatccttaaagtcaaattcactcaagtcaatgccttcctttgaagaataaatacggtcgatcaatgccggatctacattttcaaaaatctcattagatttctcgaacacatctacatttaccaccttatccgtaatataatcttcgcaaagcagaccgattgaacgggctttcatgcgcagattcacatctttggtcactaagatagatttcattttcggatacttgtcggtcaagtattcggttgccgccaaaatcaaatgatcgggtttctttataggaaacgattcccacactttggcagccggcacattacttgtcacgacaaacagacgtcccaatccttcgccaagcttcactccgtcggagaaaagctcgtcgcttgtcagcacatccaattcgcgcacgaactcacgagcattgaaatttatctgctcgtttccttttttgaacttatccagttcttcgagtacaacaagagggaggtaaatatcattttcctgaaaattcttcaagcaattgtagtcgtgaagaataacatttgtgtctagcacaaaatttttcttagttcccatgatttcttagatttaaatgttgatatttgcaatctcattcgccaatcccccatttatagtcagattgacggttctaaagataaacaaattagtgggcaataaagattgcccgacgttaaatattataaaacatggactatcagaacactttaaagtacttatatgagagtgcgccaatgtttcaacaaataggaggcaaagcatataagccgggtttagagaccacacacaaattggacgaacattttgggcatcctcatcaacaattcaagacgatacatatcgccggaaccaatggaaaaggatcctgttcacataccatcgcagccgtattgcagtgcgccggttaccgggtaggactattcacctcccctcatttaatcgacttccgcgaacgtatccgtatcaacggtgagatgataccggaagagtatgtagtcaatttcgtagaagagcatcgctctttcttcgagccgctgcacccttcattcttcgaactgaccaccgctatggcattccgttattttgccgaccagaaagtagatgtagcagttatcgaagtaggcatgggcggaagattggactgtacgaatatcatccatccggatttgtgtgttatcaccaacataggcctcgaccacacccaatatctgggtgacacgctgacgaagattgccaaagagaaagccggaattatcaaagaaggagttccggtcgttatcggcagagcccaaggggcagtgaaacgtgtatttaccatgaaagctaaagaaaagaatgcgcctatcgaatatgcccgtgaaaatgcccggtactgggacatggaaatagttccttattcgaaattgcaagaaataagaccgatgatggacaacacaattcagagcatgcacgaaatgatcgaagcaatggacgaacaatcagaagaagaggcaaaccagatgcggcaagcattactcatgttagacctgtcagacagtctacgtacgctagaccagatactcgacaaaagaaaagatgctatcaaaatccacaatgagatgtttcctttcggacttttcacagagttgagcggagcttaccaattcgaaaatatgtttaccatcctaaaagcccttgcgacactgacccgtctgaactacaacatcagatcccaggactatcgcgcaggtcttgcaaacgtatgtcagctcaccggtctgatggggcgttggcagaaagtacacagctatccggatattatctgtgacacgggacataatgttgatggaatcgaatatatccatgtacagctcaatgccattcacaaaaccttcgatcaggagatccatattgtattcggcatggtcaatgacaaagacatccggggggttctgcgagcattgccgaaatatgccacctattattttaccaaagcaagcgttaaacgcgcgcttccggaaaatgaactactggcattggcagaagaagccggattgaaaggtaccacctaccccactgttgtagaagctgtacaggcggcaaaaaagaactgcccccccaaagatctgatctttgtaggaggcagcagtttcattgtcgcagatttgttagcgaaccgcgatacactcaatctctactaacgcatcctttggcagagcttttacggcaaccgccgaacgtgccggaaaggctccgtcaaaatacgtggcatacacaccgttcatccctgcaaacagggacatatcctgaagaaagacagtggttttggcaatgtttcccattgtcaatcctgcttcttcaagaatgtgtttgatattctccaacgactggcgagcctgtccttctatcccttcagccatctgtcccgtagcggcatcaataggcaactgaccggacacaaataccataccattggcttctatcgcctgactataagggccgatagcccccggagctttctcactgcaaattacttttttcatatatatttcttttttctgtttaccgaatttcaaagataaaaataaatttcgagtaagattgacaaatctgtttctttttattatcttagcagctgatgagcaagcataattacgacatattcataagttaccgtaaaagatgttcgggcgacaagcctgaaatgctgcaactgatgctggaagaatccggattccgcaaaagggtgagctttgataaagacaatttaaacggtcggtttgatgttgagttgattcgccgtattgatgagtgcaaagacttcattatgtttatggtgccggagacgtttacaacgatccgcccgctcaatgaagaagcggtcgagacaggcgaaaaagcaacatgggacatggaagaagtggctttctacgaacggatggcatccttgacctatgaagagtttgaaacggaaattaagcagatcagccataccggagaaatcgattttgtccggatagaattaggccgtgcgttacaccgccggagtagaaaccccaaacagataaatatcattccgattgctccgcaggaaagtgaaagctatgatttcgccaccctgcaactaccaccggacattagcggattaaaagattttcaagctgtattttacagtaactcacgagtagcccgattcaaagatataaagggtgacctcctgaaacaaatgttatcaaaaccttcttatgtatctgccaaatggcttgtgatgactttcattgctctatcattaatagtagcaggaagcaaaacttatacttccatccaaagaacggcagaacaaaaactggaattcaaggattgccgcacttatgacgattatagtagtttcataaagaaacacccggacagttctttgaaatctacatgcgactccatcctgcatgaattcaatgcactccggaatgacggacgcgcttccgtaaacaacaccggaaacagggatataaaagacagagagaaagaatgggtagacgtaaaatggaatcccacaatcacactgccccagctccgctccctggtggacatgatgaataatatgctgctgattccggccaaaaacaaagaattcatcatggggaaaactatgggaaaaggatatgactcaccgcagcacaccgttgtattaagttccgattattatatgtgtaaatacgaagtaacacgttcgttgtggtatgccattatgaatgactccattgttacggaagaaggcatgctgcctatgacacatataacgtggaatgatgcagaggccttcaccaagaaactgaacaagctcaccggtttacctttttccctccctacggaggcgcaatgggagtatgcagccgccggaggcgaaagctatccttatgccggttcagacaacattcgtgatgtagcttactatgcctccaatgctaatgaacacctgcatcccgttggcgagaaacgcgaaaacggattcgatttatacgacatgtcaggcaacgccgccgaatggtgtacagactggatgagccggtatgaaaatacacgggtcacagatccccaaggtccggcagagaatcccggacaccataaaaagatagtgagaggaggcagctacctggccaacgaacgtgatatggacattcgccatcgtagcgtacagacttacgatacatcagaaccacatatcggatttcgtgtggtacttaatcctattcaataacactatgaatgcagaataaaaatgagcaggaaaactattttcagagtattcatccttctgtttttttccatcggagggcaaatgagtgccaatgcacagacaacgacaccctttgaaacggtgttcgacgcctgtaagaaagcatgtgaagcattggacggcggctttgccagtggcgaacaactgctggcagtaagcaaaacgctgcgtgatgcagcccctatcccattaaccgtcaaacaaaccaagggcgatgtcttgagcctgaaaggacatctggtatttgactacgaattcattcaagcctgcgttgataatgaaacaatctatgaaattgcggacaagtatgcagcagaagcgaggatgagaggtgataaggactccgccaacaaagtaagattagataccaaaatggtggctgccggtcagacctgtactttcgagattccgagctgttcgggaacctcgcagataggctgtgtggcagaggtgaatcgctctttcagttggaaaataaagacaatcggttatcaatcgaaaagtgaacgggaatacaaatgtaatgacagtgtccggaaaggtcttcctttccgtaaagaaaaggttagctcggacgaacggtataaaatcatcgtctcgatcaccaataaaagcaagagagacgggagctttgccttgatcttattttaatccactaaaatctctattatatgcgacaattcattctatctctattagcctgtctatgtctgacagcctactcacagactgcaagccaagccgacctactggttgaagaagctcaaaaactagaaagtaaacaagattacccaactgccattaccaaactgaaacaagcggatgaattatatgtcaaaacgggaaagacacagagtgcggaacgcgctacctgcctgcacattctcggccgttgttatctgaatctggaacgtcccgaaggactaacctatacacaaatggcagcagatatgcgcaagaccatactgggcgaaacaaatatcaaatacatttcctccctgaacaacacaggactctactacctgactgttgcaaaagactatcctaaagcagcagaaattcacagcaagacatgggaattgtgcagtcgcattcaaccccgtcccgaacaggcattcatgtttcatatcaatctcgcccgctgctacatagctttaggagaaatggacaaagcaagtgccatcgtagaagaagaagtagccatcagtaaaaagatgtatggcgaaaagtccctttcagttgcccgtcaactccagcagataggttcgttgtactacctgtcgggacgtaaagatgtaggagtcacttattatgagcaggccttcaacatctttcctgacgattcaaaagaatacgagcaacttctcgattggatatcgtccatctacctggagctgaacaatcagccgaaagtattggaatacatgaaattggcagaagctcacaataaaaaagaattggagaagccttgcgacgagcccgtttgtctgaccgagcgtgcacagtatttcgccagtataggtgacaacgacaaggcaagggcacattttctggaggctttaaagaaatgcgatgtgaatacccataaggagatcgtttttaaagtacgccacaactatgcgcaatttctctccggaatacaagatcacgcatctgccggcgaatactacgaactggcagcagacatccttcgcaacaatcctgccgaacaggctaaatttgcattggaatcttatctgggcggactcaattatagcattgccgccaagtatgaggcctccaatcgtatgctcaaccaggcactgtcggtttatgcacagatgttgccggacagactggacaaatatgtagacgcctccattgcattgtgccgtaactacggattcaccaaggagtacggaaaagccctcgaaatactcacaaaagccgaaaaactgcttccgacgggtgataagtcagataagatgggggaaattctgcgttccagaggcagtatcttataccgacaaaaacaatatgcagaagcagcagcaaactaccaacaggctgcagacatttacaaaattcttcccggcagtgatgtaaaatatcaggatgcacttagcagtctgaatcgttgccacaccatgatgggcaatgagacagcagccaggcagacagaacaggatgccgaacgtcaacgaatggcggttttaaacaggttattgaaagagaatcttgaacaattggacgcttatcgcctgcaatggggagaagacggtttgatgtatgtctccgcattagggactatcgctgacatctactatacccaaggacagaccgacaaggcattagcctatatggaacctttcctctccggcgaaacaaccgcgctgcgtaatcttttccgtctctcgaaagccgatgaacgcctggcattctggaaggatatccgttcctcactggacagtattcccctccgtgcagccaatatcgccgcaacaggtacacctgaacaaaaacaacgttttgcccggttaggttacgatgcattattgttttcgaaaggtattatgctcaattcgtctattgaactggagtctctgatccgcgcttcggaagataaatccctgctcgaccaatacaacaaggctacccttatggcggaacaaattttatccatgcaaagtgaactcccgaatgcaaccaatcagacggaagcacggaaaaatatcatccgccagaaagaggagtatgaacagctgcaactggacttgatgcgaaaatctactgatttcggcgactatacccgttatctttccgtcaaatggcaagacgtacaaaagcatctgcatggaaactccatcgccatagaatttgctctcatagacgatgaattactagctccggacaaacacctgaccgctttcgtacttcgtccgggcgacgtgtctcccaccgcaatcaagttaatgagtcagaaattgctatcgaaagagatacaatcgcctactgctttcaccacaaccgaaaacagggcacatttctggaaagcgctggatgaatatatcagcaaagcggacactatttatttttcaccagacgggatacttcatcagttacctgtagaatatcttccgtatggagcgggtaacctgccattagcattccagaaagccgtctatcgtttatcgtcaacaaaagaaatcgcactcgatagagcttcgctgaactactcatcagccgcacttttcggaggattagactacgaaatggcttcaaccaaagttcgcaatattgtttctacagatcataactccgggaaattccgtaacggacagaatgggtatcatgagttaccatatacgctcaatgaagtaaataacgtaaattccctattgaaagaaaagaagattaaaaccaatctattcgtaggtgaaaacggaacggaaaagcagttccgggcactcgacggcaaagctgtttcgttgattcacatagctactcacggagactataaagaattgaagcaacgtgaagccgatgatgcgatgaagcattgcttcctgattatgtccggcgccaatgccacggaagagaataatgacggactgctccgtgcagatgaaatcagtacactaaacctccgcggttgtcgtatggttgttctttctgcctgcaacaccggtcaaggtactcttggtgcggatggtcttttcggtcttcaacgaggctttaagaatgcaggagtacaaaccatcctcatgacactttcagctgttgacgaccaggcctccatgcttctcatgactaaattctatgagaacatcatttcaggattatccgaacgacaggctcttatcaaagcgcaacagtaccttcgtgagaacggatatgcagacagtaaatattgggcaccatttatcttgttggatgcaggcagatcgcctattcctcatccttcgagatcttgaaccctagtttcataatcagtttcaaggtttccaccgaagaatttctgtcgtacaccttttcttcctcaggcaattcttcatacgggaccaggcacggatgctgcttcaacacatcatcccgcttttttccatacgtccaaccttgttctattctggttttcgaccagacttcatgaacattcttagccatttcttctaccaggtattccaactccttcgggagttggatatgtcctgtattcaccggattgggaatatactctttcattttatgattcattatttatatattagcggaacaatttccaatctatctttttaccacaatgactgcaatatatttgatccatgaagatatacgcaccacattcacagactttggcatcaccttcattcttcaattttctcatcagctcattatgaagagccgtatcgccctgtttgataatactataccccagctttttcatcagcttgatcgtatcaaacgccatacgtcggtcatattctttttccgaataaggaagcatggaataaggcaccatgtccggagtctctttcttctcgtcatccctctgcggtccataagtccatccttcttcctgacgctggtcggcccagacttcatgcgcattttcagcaatggcttcacgcaattcaatcaaatcagtgctcaattcaacatcttccagatcaatgggccgcggattataatccagatcaggcactttcaccctcgcaagatatgcttttgcatcattccatgccgcaataaagtgatccttgggataggccgtactttcctctcctgttgcaggatcataaagcgtcacttcctcttcatttacgtcaagcactactgctgcatgataagcaatttcctcctcgctattttccggcaaccggcaactatttaccacaacaatcgcatcatgtccggccttgagggcacgtatgacactgtcaatactggaaccataactgcgcatcacaatcaatccgcgttgttcgagcaggcggcctacactatgcaaaggagttcccctctccctcaaccaactgttattcctggcctcctccgagagttcatccgaattatattcaatctttctacgtttcaaaataaactgctcacactggaaatcacaaagattaccttccgatttggctgccatctgcgccattggcaggaagtccgtttcttcatcatcagctcccatcatggcatccaactgttgagacaagataaattcctcttgcaaactttcatcagtcgccagatattcaagtaccaaagctgtttcttcagcattcgtcttaccttcttcaaaagcagccaacaattcttcggttatcatatttttatcttttgttttcatacttcttcttatcattcatagctaagtgagccaatgctgccagcgcacgctttttaatattgtacagattagcaacagttattcccatagataatgctaaaaattcaggttcgacctctttgagtactaattccctgatgaccatcacataccgcttattcgacatcagatcgaacaaacgttccaaatcaatctttgcggctattttcgattcagagtcgtctatttcttcttcatgattctgctcataaagaggctctttactctcgtcttctatcatctgttcacgttttttccgggaacagaaaaaacgaattgccacaatcttaatccatgttccaatggtgctacgtccctcaaaattacgaagaacggcagcatcattcttcattagatgatagtagagttcgctgatacattcatcgtaatcaacctggtaatcaaatatcagcttaattacattgataaacaacggacgatattttatgttgaaaaaccaatcggtgattttttcatcccgattgattaatccgtcgactatttcctgatctgtcatatagttagttctttttcaatctaaaacttagctcaaccacacactggtcataagggatggtttccggatatttacttcttaaaatatcattatcgacgatgcatttatgcttcttctgctgaaagtctttatctccgtcacacgttacaaatccttgcagttccatacatgcattccaacgcaaatgttcgcacttactcaaattatcaaataatgtactggaaacaacgtcacaaaccttagaatagttcaatgtatgggcatcacgctgcgtcagctcaaccatctctttcaatctttccttattatctttgccatcctctcccatggccccggctaaaaactttttggtatcgatatgccatacattagccctatcctgctcttcctgataagccaatttaatttgtgcattcaagctatgcttgtcctgcaatgcctctctacgcgcattccattcttcttccgctgtctgcttcaggctttccttcgctttcttcttctcttcaatttccttctcattcgtttcaggcattgcgtcaatcataattttctgatatgcataataaaattcctttgccaatacttcaagcacatctgtcgataccacatcgtacgagaatatttcttcctgcgctccaaaagttatgattacatcccgggtattgccataaatattaaaatactcttttatttgcttcagctgaatggtgttgcaacttccattgacgcgcagataaatcctaaaatcattgaaacaatcctttctatatcgataggcatattcgtagagatcaatcgccaatgccatcccttcattatcatttcctatagcaattacaacatagtttagatcatgaatgatttcagagaatttttcccaaaaacgttcggaatggatagacatttcttcacaccattctaactcatttttcctctccttcaaggcaggtgctttcattaaaaaatcacctttcaattcatctatatgttcatcaaccacatatattttttgagggttcctattgccatttacatcgatcaatgccccaaactcatatagaaaacgaaatgcatcacgtccggtttctccaaagccaataatcatcgacgtaaaaggtttctttacacaagccttcgatgtatcgacatctacaaaattcacggggtgattcctcacattcttttttaattgcaatacagcaagattagacgagtcgatgatatgaatctgatgtttcaacccatcacatatttccaacttctggttctggttgttcttacgcgcatggcaataaatctgaacctgattatggactctatcttctttacatttcgctatttccttaaaaacagacaccgcctccagattcagttcttcattgggagacaagaaatagaaagttgcctgcgggtacttcttgattaggtttcccaatctcctcaatccgagatatttgtataaatcaaattccgatttgactttatctataacccggcctgtgattccaaatttagagttaaccagtatgccgtcaagctcttctatcttttctatgaatttttcagttccgtcatgagacgaattaaagaaatgactgaatgtgaaccggccatgagaactgctttcattagcagaaagcaacctcacgaaaatgaatttacaattctcccatccttcttcattcttccccttgggctctgccgctttttttcttatactgttagccagcaatatcgcattatcattgacaccccagaaaataaacagccggcatttcttctttcttgaaagattcgccgcacataaccgcacccatgagatgaatctgaatcctaacagtttgatgataaaaaccgcactcactataacggccaggaaatgtatcacagaaaatatcgtcatgtagaaaggatcatgatgcagatcttcaggaacctccaaaagatcggaatgcgaagcgaacatttccatagaagacagagcagacctaaacgccaacgctatcgaattactgtcactccctccctcattaaaagcataccaatatatcaggaaacctgcaataaataccgtacctgcaatccatttcaggttatccactaagaatttccgtttcttaaaaagcaggtatactaaacctatcccgataatgattaacaaaagggtagaatatccccattgatttaaaaaacaagggtctgtcgcgtgctgtgcattgcattcaccagtttgagagattactgtgcttaacatatacatattcgatagattgattatttattctacaaatttatacaaaatattgaataacaaacagattagtaacaaaaaacctcctgcaaaacgaattttgcaagaggctttcctatttcttctttaataagattattcagctttttctttattctcctccgctggagcttctgcaggtgcgggagcatcctccaccggcttgtcaactttcacctcttctcttgaaacgtttacagtcacatttacagaagcaggctgtgcctgatatggcatacggtttttcggatctgctccgtaaggattaggacctaccgtaccatctgcaaacaacatatacaatgcaaaaatccaaccaatgataggcacacagcacaacaaaatcagccaaccggatttgtttaagtcgtgcagacgtttcacaccctgtgccaaagagaaccagatggaagcaatcatagcagcaagaccgatcaataaaccaaatactgatcctccggccgatccgctggcagcacccaaaacaaatgtacctacacctagcgcccatgcaatactggaaactataccaccgataatacccgacaggaaatattcaattctacgaatacgcccgtcaaaatacggggctcaatacaaaatgtggcatgaatgaaatgtaaggtgaagtacgtgaaaccgcctgtacatcggtgattgacgaatgtcacgcaatatatttgggaagaaaacaaaaagttccgttccttctattttgcttccgttgcttctatattcattccggtggactgtgctgtaaataggggaaacaatgagagacagattgaaaaggcgaaggaaagactgtatgttgcttctgtttttaggcttaaaacaaaggctatacgctccatttagatgggtgtatagcctttattaatttagatatagaaatacattacagcggcttaaaatgctattttcgtgcgcttcgaataagcactccttgttgtatgatcgcttttttagtagcgaaggaaacaccatcggacaaccctttgtgacgtagggtttcttccgtaatacctatttcttcagcagtaaattcagaatagattgctgatatagaaccaaaaaaacggcttgtttttttgaaaatgagatgaacatgtataaccttagtctctttagccatgactttacttttagatatttgtaatactaaaaacttctatatagttgctatatggaagtttttctaattgcaaatatacgaaataaatgaagaaaataggatgtatttttgtttatttcgtgataaatacagacttatggaaaagatataatttattgttaaaatagcctatacccatgtcagcaccctttaaacacccattagaaaatagagacaaaatgtgaatatcacccattaaacacccattaaaaaagaagtgtttttattattgagttttaccctataatactggtatatgcattgagttataccctataatacaacttttaggaatacagatatttttggtaatatgctaaaaaacaatgatttataataaaatataatgtttaatattaagttaaccttttcataagtagggacatttgacttttcaaagcatccacatcgtcttctaaatggtttactttatcataatacgtcgcgttaatattaggcatctttgcgcttaaataccattccacatatagtatagtattaatctcatcttccatcaaattaaagtttgggtaattagctttatcaacattatcagaggtacaaactataaaaccatgttcacggaatctattttttatgcgtttcacgtaagcacgtccacttctgtcgcttaccacatatacatgattgtctttaatctcattccattcacttcgatccaataatcttaaaatgagatatgaacagtctaataatgtcggagacatactttctcctcgtactttaacacagaaatattttctattcctacgtagcatattgtaaggaagcctaatagtctccacgacttctataaaatcaggattttcacatccataacctgcagctacagatatatcaacgatagggattgactcaaattccgactctattggaacgattttagaaattttcgtttgattgtcatcacgcaacattgaaccacatccagcaagcaaccaatccgtagagatatcgctataatatgagagaaatttcaataaattatcttcagacattccatttggttgactcaacacgccattggttatgcctgtatttttataacattcatactttgtaatccctttaaaatctaaatattgcagaattctctgctttaatactgaaaaatctctcatgttttctttcataattgaaatatctctattatatttgcagcgtgttacagattaacagcgctcaaatgtatgaataattactctaaaataaaaaggtatgaaacaaataattgaattaagagacaccgaaaaacgaaagatgattgcagaaacatttggaatatctctcgcaaatcttagtcaaatactccgtttcaaacggaatggaaagaatgcagaagctattcgtagaatggcacaagaaaatggtggaattaaatatactgaaggtaatgaaccatcaaaagtgaaggttttggattctcacggaaatgtaacaagagtaataagcaataaataaaaatctgcaatgcaaaagaataagattttgaaacgtatagatcgcattatttttcaagccattgtcatgggtgataacttaacagcagatgatgtgctacgcctcggcaaccatgccagattcaagaagaaactattcatggttggtgacacgtgccgggtttcagtgagaaagttgtccaattcagcgagtatattcacagtcgtcaattactactacatcaatagtctctgttttacggatcgtatccgccactatttgggcaaattgaggacaacagcatttcgtaatatgggcataagtgaagtctttgtcgtaatcatagatgatacgtgcctttagcttatgaacaggacattttacatctcggagtatactcttgcatattgtttggtctgatgcaagtttagattccaaatcatcgaaaaacatcataacggtttatttaaattaaatattttccatattggctacaaatgtagcaaaactattccggttcgtgatgaataggaatagcctttttagaaacatgaatgtagaacaagaaaaacgatatagtatatgaaaacatttagagtgattcagaatgtgttgatagcggtcgggataataactaccgtttcattggttgacgggattgaggtgtctgcctctaatgtgcaggcggcttttgttattgcctgtttcacgatagtgaccattcttgaaagggaattccgttcggaaaaggacgaagagtaaaacaagtatgcaagcaaggaacttccccgtatttcgggataacacagactcatggtttcagattgaatttgtcatggtattatttaatggtgttaggacaggttttcaatgggaacaggtgaaaagaggggaagcagctacaatcctggggcagtgccgggacttgcgctaaagttaatagtataattattatggctgagatatttaataatcggatttgcgtgtttgcgaatgaattaatcatcttcaatcccaaaacgcaagttgggagtgaagatgggttcattcctgaaggaacatactattcgatggtgaggaacgggcaacttatcgtactccgtcgtggtattcccggatgtcctgccctagtagattttgaaaccatgagaaaggacgtaaagaaagggtacattgtacgtaaaggtgatccccgtgcagaaattgccgctaaaacacagaaatccatactggaagatgcgattgtctacagcaatgccgcctacgagtttttcagtgtgaaataccgctatgacggtgacaagaagcttccccccgcgaagattgacgaatatacccttaatgtgcgcatcatgaacgcgctcctctcccttcgcgatggtcgtaaagccaactcgataggcggtggtggtacgcgcatcaacgtttgggaaaagctctgtaagttgagcaatgatcttctgacactgaaagacccgaacgggcgtgatatttttcctcataacctgccgaagaactggaaggctttgaaacgtaaatgcgagcaatatgaagcggcacgacggatcagtgaggaagaaggctatcgcagtgtcatccataaatcgtatggcaacaaatacgcggcagtcgtactgaacgaggacgcaaaggcagtgatgcataaattaatcagtatgcataacaatctgaataatgttcaaatcatggaagaatacaacaaggtggcttccctgatggattggaaaccgatcgatagtcctaccaccgttgagaactggagacaaaaatttgctctcacaacaatggcgggaaacaagggagacaaagctctgaagaacacacgcatgaaacagatacaccgcgaagccccgacacaagcacttacttactggacgctggacggatgggatgcggaactgttctaccagaaaaagactcccaaaacggtaaagaaaaacggtgaggaaaagagatatatgtacaccacttataccaaccggaaaacgatggtagtcgtacttgacgcatgtgaaaaatatccggtagggtatgccattggcgaccatgaatcacccgctcttattcgtgaagcattacgaaatgcggtacaacataccaaagagctatttggggaacgctataagcctttacagctacaaagcgacaattatcaaaagaaggtgatggttcccttctatgaagccatgaccaagtactatacaccagccgctttgggaaatgcaaagtccaaaattgtagaaccctatttcaaacggctgaacgtggaatactgccaaaaacaggcgaactggtcgggcttcggtatcactgccgacaaagataaccagcctaatttggaagtattaaaccagaatcacaagttcatcccggatgaagccaccgttattgcgcaattagaggctataatagcgcaggaacgggcaaagaagatagatgcttaccgcgctgcatgggaacgtaccgaagaagcccgcaaaatgcctttcgggattgaggaatatctgatgctcatgggggaaaccaccggacgcacaaacaagatcacaggttcgggactgtttatcgagttcatgggtgaacgaatctgcttcgacagcttcgacctttccctccgcgaccattacaacgaagactggatagtacgctttgacccggacgatatgagtcaggtgcttgtatcgaacgcaaaacgcctgaagtccggtcgtgttgacaaagagatcgggacattgcaatacgtactgcaacgtgatatcaaagttccgatggctttggctgatcagaaaccggaacattttgaataccgggcacgtgtcgacaggttcaacactgaaatggtggaaacggtgaaggagaaagtgaaagaggtagacaggagaatcaccaccatttgccaacgtatccccgaaatagctgcaggaacggttcttgaccgctacctgataaccgacagcttgggacagcacaaggatgtccggtcgaaaatgagggatgacgccacggacgcggatttcatggaagtgacccaacatatcacccggcaaagtgtagcaatggcttccaccggaacggatgatgaagattacgattacaacccgctggacatgaatttttcaagatgatttaaaaacaatttaaaagatatacaacatggataatcaagcattaaaaacgtacatagagaagttaatcaatcgcggatcatctgcaacggagttggcgcgtaaatgtggaatatcggataccgccatgtcccaattcagaagcggcaagtatggagctaacgaagactctatcgctgaaaagatcgcttccggtcttaattactacgaaaacgcctggaatgtagtggaaagcgtcaccagttaccagcaggtacgcaccgcgttcgtggcagccaaacggaatcacaaatggatgtgcatatcttcccgatccggcagtgggaagactcaatccctcatagacctttataacatgagtactgataattcagtcatatatctgaaatgccggaagtggacggcacgtaaattcctgaccaagttagccacatgcatgggggaaacggtaacgcgctatatggataacgatgaccttatggacttggttgtttcacacataaaccgcatggctggaaaatcccctttgttaatccttgatgatgccggaaaactggcgcacagtgccctttgtacgttgatacctctatatgatgatactttacaccgtttgggggctatcgtagccggaacggagacgctggaacgcaatataaagcgttatgtcggtcgtgtagaaggatacgacgaaatagacggcagattttgccggaactacatcgcattactgggagccacaaagaaggatgtcaaagccatttgcgcggcaaacgggatcaatgatacggaggaacaggaaaacatttggggaaagttgaataaagagaaaaaagagcctgtgccgggaaaatatgtttggtttaccgatgatttgcgtgaactgtccggcatgatcgaagaccgtataatcaaacaacaaatcgagcgtggagaactggcatgaaagtttggagtcagaagaacctagaagacatccgacatgaatatattgattttgacggtgaatggtatctggcattcggtcgtccggaaaaatccggttgctggatcatttacggaaagtcgggacaaggaaaaagttctttcgctctgcagctggcacgcaaatttgatgaaatggggctccgggttctttatttaacacttgaaatgggcgcgtgcgacgacttcgtgaattccgttcttagtgtcggcattcatagtaaaacgaataatataatctattcggatgaagccaccatcacagaactggacgaatacctctcaaagcaacgcagcccggacgtgataatgatagactccatacaatacttcgagcagcaagggggagcgaaagcccccgaaataatccgcctgcgcaagaagtatccgcgaaagatatttgtcttcatctcgcatgtggacgggcgcgaggtggaaggaaaaacagcctatgacgtgaaacgtgacagctttaaaagaatctacgtggaacatttcaaggcaacatttatcggacgtggcaaaggaggttcacgcggatattacatagtatgggcggaagggtatcaaaaatattggattgaaaatattaaaagcgataatgatggaacagaagacgaagaaacctatcagtaagagccttatcaaacgcctgcatatcatatacagcgcacaaggcattgatgacgaacaaaagcgggctatcctgctagacctgacagacggacggacaaataccacaaaagagttgacatacagcgaggcaatgtatctctgcggttatttgaacggtgcgaaaaaagaaaaccaggatctaaccatcaccgaacgggaaataaggagacgcagatcggctgtcctgaagagagtgcagcggatcggaatcgacacaacggactggggagcggtgaatgcgttttgccttgatacccggatagcaggaaagaagtttcgcgaactggacggggaagaacttctcctgttgataccgaagctggagtcaatattaaaaaagaaagaagatggcggatattagtgcggaacaacaccggataaaccggattaatgaattactggatcggcttgacaagattcccggtgagctggatgccatacacgaaaaattgtatgccggaaatatgaatcgtaacgagtttgcgaagttggtagaccaaaggtcatcgctttatatcgaagcggaaaacaaggaacgggaactgaaagaagtatataaaatcaaattgtaattaatcatttaaaagttaatagtatggatattagtaaattgtcaaaagaagaaaaggcggaactgttgcgtaaactgaaagaggaagaaaaaacagagtccattcagcggaaggaaacctacgaagcgttgagacatcagttcatgttcgatgtggaaagtaaactcatgccagtagtgaatgatgttcagggcttttatgattggattgtgggtgaaagcaaggctttccgtaacgtgatgcgtgaatacggtcagctccgtatgcgtcagggtgaagaaaccgccactttttcagtagtagacgggaacttcaaactggaggtaaaaagcaacaaggtgaaaagttttgatgaacgtgccgatctcgctgccgaaaggctgattgactacctgaagaattatatagcccattcggaaaaaggagtcgatgatccgatgtatcaaatggcgatgacgcttctcgaacgtaaccgtcagggggatttggactataagtctatcagcaaattatatgaattggagtcacgttttgatgaagaatatgcctctatcatgcaactgtttaaagaaagtaatgtcgtgtataaaactgcaactaattactatttccataagcgtgacgagaacggagtatggcgtcgtattgaaccttcattctgtagattatgattatagcagttgactttgacggaaccattagccgggggagattcccggctattgacggggagcaaccatacgctggtgaatcgctccggaaattacatgatgaaggacataaaatcattatttggacatgccgtactggtgatcagttattgaatgccatcaactggctgttggaacgcaaaataccattcgaccgtgtaaatgaccatgatcctgaaaatgtcgctaaatatggggaaggcgggaaaaagatatatgcccattgctatatcgatgacaaaaacatcggaggttttcccggatggctggcatgtgtggaggagattgaacggatggaagaagcctataaaactattttaaaagaggataaaactaaagtatgaacaagaagaaggagataatacgcactatcagaaattttaaaaggattctgaaaagtgggaatgtgaaaacgatattggtcgttagtgattgggatatatatataaaaacatacactattgaggaaattgctgcccgtttcttacgaataaaaggttataatgtacaaattaccatatcggataatacggagcacccttcctaccagtttggttatatacgattctatcgttatgccagaatcaagtttaattctaattagcaaaaagatgaatgcaaaagatcaaagaaaactgtgcaaagccggctatacaatcctgcgtcgccatgattacccccagccgcatatcacttttaaaagcgatataaatccggatagttggaaaaggtatggggacaattatccttcaaaagcggaaagagaccgggcaatgaaacgtttgctaacagatgataaaatagtagaagattaaattggatatgaaaaaagataatagcttagaggatctactgattctatatttagtatcagtaataggtatatttacctccttatcggttttggcttattgtggagttttaaaataaagggataacagccgggaaagatcggcttttgataatatttaatttagaaaggaataagaatatggcaaagatttatgtagcaagtagttggagaaatcaacatcaaccacaagtagttagtttccttcgcgagcagggacatgaggtttacgattttaggcatcctgctggaaaaactggatttcagtggtcacagattgatgaagattggcggaattggagtacagaccaatatagggctgcgcttgaacatcccattgcacaggctggtttcaaatctgattttgatgcaatgcaatgggcagatgtttgtgttcttgtattgccttgtggacgctctgcacattcggaggcaggatggatgaaaggagcaggaaaaaaagtaatagtctatcaaatttgggaagaagagccggaattgatgtataagttgttcgatggtgtgtgctcaatgggggtaggattacagatgtttttagctgaatttgacaaggagaaaaataacgtataacaagataataatgaataaagataatattattccacctatgacgcatccttatgggatgtgttggcaacagccgccaacttacttgatactaattgatgatactcatgcagtgatgagtagacttgattttgaaatactcatggattatacttgttctcgaccgtcagctctctataatggtaaaatgtggaaagcacaatatgagaatgaaggtgcgttgaaatggtttctttgctattgtttcaatgagaatgagaagacgaatgagatagacattgcatatcgtgaaattttgataattgactaataacaatacggaaaggaatagaatgttatatatagcagaagtagtagcaataatcgaagaggcgaaagaacgtggagaacattcgcacacattcataaatctgtcttcgtatgtacgacatatactaataaaagtcggatataaaatacgtttctctatagatgagaattggaatggcgtatataaagtagagtggtaattttaagtaaaacaaaatagatgagctttattgcaagacaaaagaatgggcttttatgccgattctcaacggtgatagatactgttagtgattataatatgacagatgaagaatatattgaaatgtgtgcccaaaaagcaagggaggaagctcaagaaacattaaaacattctcttcgtccgtttgaagaggtaaaagcatcttttgtacctaccaatatgagccgtgatgagttcaacaggattttaaaattaatggaaaaagaataactataaacatgaaacgatttaatacccaaacaaggtttgttcccctaaagatagatgaagactttaatgtggggcatattcaatcgaaagacggaaaagtaaaagactttaaaacgcgcaaggcagttgagaagtattgcaaagaaaatcattgcatttattgcgaagaaaaatacatattctacaaatgattatccgttcgagaaaagccgcgcaagaaaaaatctttgcgcggcttaattttatattctcaaattacagcaatcattcgggctgtagtttacattcttcttccagtactgaaaatgactatccacgtcctcacaaactgaaatcttcctgaatcctgaaatcttatttagatattcgatttttcgctccaactgcaaatgattataccctgcatgcttcagggtgtattcggaatagtcaatatcaaaccattgcttcacccatgtgtttacccgcaagaactccaccagaatcttatcacatctgatactgttcagaaccctaaaatcaataaattgagggataaatggtgataacctgacagagacatcaaatccttgctcctgcagcttctcaatagctttaatccgtgcagatggcggacacgccttttcaaatgtacgtgaaagagtgtcatccgtagaagtcacagatatttgtatatgcgccagttttctatccatcaaccggatatatatgtcatctgctaccattgaggactttgtcacgataaggtaatgtaccccttgtcggttcaggttctgaattgctttataggtttccctgtaaacagcctcacaaggttggaaacagtcagtcattccacccaaacgcacaactgttccccgctctaatttgcagatcttcctccccactttgtccgtccgggaaacagatggattatcaggatgccatagtcccctgaaattaaggagtgactttgcataacaataagaacagtcgtgaaagcatccacagccgtagaggtctaaacgtgtcgggtaattgcatttatttccttcatttccggagacggtcttataaaaggacttaaactctggtgcttttgtgaacgtagtcacccattgtggtgcatttactgtatatccggtagtcatacccgcaatttcttctttcaacatgctcatactcttttaaaatgaatgtttataataataatacaaatttgattatctttgcaatgccaatcacataaaacaaaaatgcgagtagacgcagcaagggtttttgcccccggctgtgcgtctgctcgcattttgttagtatgtgattggcgtctttactaacaggctgggggcttttttatagcctttcccccacaggcttatattcaattttgacaaatcactgaaaatccgtatatttgcgcttataatagtgctttcttatgcggaatcctgaaatgaccaaaatacgtgaccggaagatggtagaaacgttctatcttctctatgataaaaagcgcatccgtttggaggatgttcttttgcgtatgagtcatgacctgttctttcttgatcagaactacatctacaaacggattttttatatatcggagaatttatcatattacgaacaattaaaagagggcaaaaagcccgattcaaaaaagaacgatacaaatcaacttagtcttggtttttaaccgttgcatcatagatgatacagcggttcttcgtcttccgttttctccggtaagtccccattgctaattttcatttcacggtctttcatgtcggcatggcttgcaagttccattgtggtgtaatccatgatttcacattcaaagctgatccggtacaggtttcccgcaccccccgactcttcccgtccgacatgggtacgtcggagcgtgccgaagttctttcccgattttccgtgtaacatcatccccagcaatgtcaacaggtcaagaaaggacaacgcctcttcctgcatagccgcaccttcgtaggtatcggaaaaagtttcgtaaaacagccggaaatcaatctgcgtgtgaagccgctgaacgagtaacccttcatcctcaatacccagcgtattaaattcaatgaatacagccggggacgaaaagggatgttcttcatcgagaaaactaacctgttcatgccacatgtctatatgttcaatccccggtgtattttccatccgttcccttagctcggaatactcatccgggatagatgcgaggaactcatctttgctccgtattatttcaaccagttctttgtagcagtctgtccaaatcataactatatagattaaatattcgagaatcgtttgtcaatctccgatgcgatccatgtatcgagttgcttcataaacgtagcggactcacccatatactgacgtttggggattcttatcctgctgcctacttttttaagtgccatacttttgtaaaaagaagccattgtagacagccgctcattggctttattttgccgtaattcgccatttttcctcttttgcattgatccggtcgacttcatgtacaaataccaaaaataacgtttcattcgctccgttacgacaatgtacccgccttcattgtggatcttggcataagccagcggatcggtctgataaatgatacggtctattccacggctgaccgcatgtatgctgtcacggagcttcccgctttgtatcaatacgccacgatccgaaccgattgcgagtgaccttttagcccacggtgtcagtgatgtatcaagaaacccctgcctgcgaaaattctgcttgaagaagttcacacccgcaactttcgcgtagcggtgcgcatcttctaccagtgtggataattctttaaaaaaatcaggtaattcagttctttccatttgcatttcaaaataaaattgtatatttgcaatgttcgcggctgtaacaggtcaagagctcccttcaggagtggtagtttcggctactgctcctgaagttctttaagaaggtcggttgcttttccgtccaccacgtcttgccatgacactttcacggcttttctcttataaatgaacaccatccgctgcccggcatacttttcgccatacagtttgtatatgccgttcagtttgtttttcagcatttccggttcgacagtgtcaaaagcgctcaaattgaatacagtatattcgcactgctgttttttcgaactgtcaagcccgtgttttataccgcccagcccctgaatatttttcaggtctgccagcttttcgtcaatcaaatattccgggttctttaccccgtcctcgttgatgtgcgggcggatttttactttcatcttcagttcctttgaaattacccgtgcgctttccacattctttgccaagtctttcggatcagcaaagtcgctgatcatcactttcgattccggatcacgatgataaggggcgtatattttattccgctccgtctctttcctgatttttatcaggtcattgtccggcattgaaaaataaggatgtgcaaccgtgaatatctcaccggattgacctacgttattcgcaaaagcatccggtatcgtcacaataggcgtagcaggtgtttccggttcgtccgtttgttcgacataacacctgcaccgatatccgttgggcgggtagttctgcagccaaaacggatcgttaataggttttacgacaccatccagtatcctatgtgattctcttacccgttcatccccggcagtcacatacttcaggttaggcattatatccgcattctccttgaattcctgccattcactggcgcgtctgccgcttgtttctgccgtttcaaattccgtgcgaaggtaattttcattatagtctttatgaattgccattactttttcccggaagtcctcataagaaagttttttccccttatcatcataaagggcatcattcatctccttaatttcctgatacgtcttcgctccggagaacttgaacaagttgtcacgtatccgttgaggttcttccgcctgttccggatcattatagtcgtcttctccccatccttcagccgccttcttattcagttcctcgtatgtctttctgaataattccccgtcaatattccctgtcttaactttacgttcgtaaacctgtttcatcactcttccgatgatactgctgaaatcatactccccggcttccatgacaggcgacgttaccgtttcatcgtccggttcggtcttttttttttgagggtctgtttggggctgattcggcaatgttcctccctgctgctcaccaccgggatttttcttttgaccaatgatcggcaaacctgtttttttagcaacttcttcatggtcaaactcaaaggtataagccagcttgttgattgcttcgatgtattccgtgatagacaaactttccgtgtcgtcccacttcagtttcagcctttcaagcggtttgtataccgggctgatctttaccagtttgggaatgataatgtaattgaaataaaactggaacaacattttatcatattcgtgccgcgatttttcaacacgttcatgtacttctgccgtaccttcccacgcaccgttttcagttgttcccgtctgacccagcaaacgtttactgatctggttgtcacatcgttcctctaacggtaaaaaagcattggttgtatttcccccggcttctttcccatactcgaccgtttcgtttccttgcagcacagcaaagaaattattcctgaagtccgtcatcatttcgaataattcgtccatccgctttttatccattctgtctgaagtaacaaagacgggcggaacaccatatttttcgatataattcatccatgcccccaatcctaatttcttggcaagaatgatgaccgccagttcgttgagcatccccagcgaccacggattcccgaattgtacatagtacggttcaagcgcaccgtctttgtacgaccatccagtctggtctgattcctccctgatgatgatttgttgttgtggaatgtaatttgacatgggaatttcttcgacatggctaatttccaaattatcatcaaggtgggaaagatcggcaagcgataccccctgtaactgatgcagaaaacagattctgataagctggtgaaaccatggacgatccagtaatttttttgcttcctcatcttcattgtcattatcatccacaaggttatattttgcctgttgcacaggtaagacgcgattgtcaatggtcgtctgcaaatgttcatcgttatataacgactgaaaaaagcggtataataaaccacgcctgggatcatccggatcggtagctgcggtcactgacatgatccagtcgtcaatggtcttttcccgataaacaacagcctgccttttatacattgttcctgacgttggcaacccactgctgtccattcgataataatactcattgagtatattcttcaggctcatccgacgaatagccttctgttgaaaccagttgaatatttctcttaacttcttgtacataacataccttttaaaagcggtttaaaaactatttaaagaaaccatccaccattgcgcgtgtgcccgtataatatgggatattgcacgttcccgtcttcatccgttaccgggggaatatcctgtggcaaagtcatgatcccgtcgcgcagtttgacaagtatgccgtccgcccaatcgttcaagcccgacaaggaatccggaactttacgggttgcattccggctgacagcacgacaggctgtgatacatgcgaccacacgtaccaacaaccctgtccggatcggaggatcaccaaatattttccccacgtcgtaacgaccaccgatataggcgcacacttcacttatgacaaggtcttcaatccctgccagtatctcttcttctttctctatactttcgatcagcaaccgattctgtatgatggttgtcaaatcatccatgttgatgtacttcatagttaccaagtgtatttacgtttatatcttcccgctttccacggtcgtgacgcgggttcatcctctgattgtgggggatcagtgtatatttcaagtttcttcaccgcctgttcatcggcatccggactgtcgtcatgttctgtcatacccggttcaaccgcatacaattgctttaagccgacagctatgtcagggtttgactttagcagttcattgacatacatacgaccgttctgataatacgggtgcatggaaagcatacgaagcaacttggtcatcgttttgggagtttgtattggaaccaaattaagctccacccccgtttccgcttcagcttcctcaatgttccgtttaacttcatcattccagaattgactctcatattgccaaaaacagataatgccctttgccctgaattcagcctgcttcatgcacatccattgtacgcagagtttcatctttgactgctttacgaatccgtctatcagccaaaaatcatttttatggcgtccccaaatcttacatgcgttaaagtcacttgtatctgtcccggcatacgcaatgtcccaatgtgccacgatcgcattcatcgtgtgaaggtcagggagctttccccacttcaccatttcgggcttgaatattttacccttgacaagcggtacgtggttatattccgcatgtgccgcgagaatgcccatgtctttttcctgctgacgatagaactgggcggaatacatcgatttccacgctggttcatacgttaccggatcataagccttcaccagatgccagtcccagtcgggatgccgttgtttgagaatcgtctgtaccatccgggatgcaaaacggttgttagcacctatcagacgtctgcgctttcccgtcatggttgccagcacgtccgcttcgatccagtccgcataatcatcctgcatccggttgtttttgatggtctgcggtgtctccaagtcgtcaattatccacaggtcaggacgatgtgcgcctttacgaagcccgcgaaccttctgcttcgcaccgaacgccttgcaaataaagccgttcatcgttacgaagtttcccttttcccaatatcccggattatactgctcgccaaagtcgtgtttcaaaagttcgtttgcctcgaattccgcacgtaaatcttccagcaggtcacaagcgcggtcaaatgtgtcggaaacgatacacatataatgcgtctcaccgttaatccataaccataggggaatgatcacatcgttccataccgattttgcaagtccgcgtccccattcggcatatcctttataaattggatcgttcatcaccctattggcatgagcgatctgaaagtccgcacagtctgcggtcgcataatggggaagataggtttcgacaagatacttgacatcccgcttcgcacgctgtatgcggttcatccgaactgtcagcgattcgtccggatcaatcaggttgcccgtgcaccgcgcacgttttaacttctcctgatactccttgagggctttgctatcttcgactttcattatcccaacatttttgcggcttcataaaggtggttctcctgaaagtccagtgttttaaaataaaggtctgcatcgtacaccttcatcgcatcgaatatccggctcatgacatcaatgtaaatagcgagcgtaatccggttctttttgtccacctctttgagctggtttccccattgcgccacactgttgtcaagcgtagccgcctgtttccgtagttcgagcaccttgtcgctgtcaccttccgcaatggcttcgtcaatcatgcgcagcagctccagtttttggtctgcaagaatgttgataatctgtttcaggttgtcaccctgcttttgcgatgaaataacagatgcctgacgctcttttttccaaagtgcgtcattctcattaatccagcttgaaacagacctttccgacacgtttattcgtgtggaaatctccttgcacgtcattccttcacgtacataaaggtcgtgcgcttccttcttcaatttacggtagtattctttgcttggcatatcgcttcctttcgtttacgcagcaaaggtcatatttcatcatcacctgtggaaaacggcttttcatgttggaacgtattctttccaagttggaaaaaatacgtccttgttaacactgttttttttccaagatgaaaacgctttttccgtacccgcctttccttttccaattttgcagtatgaaattttaaatatcgcgaaaatgaatctgactgcaacagcggaaaacggacgtgcccggattgaactcaaaggcacaatatcaaaatggagggagacggaagcggaattcacttccaaaattgagcaactgataagatcaggaatcaaggatgtgcatatctatatcaactctcccggtggcgaatgcttcgaagccaacgagatcgtgaacgtgatcaagaagtttcccggcaaaattacgggtgaaggcggtgcgctggtagccagtgcggcaacctacatcgctatcaattgcacatcgttctccatgcctgccaacggacttttcatgatccatcaggtcagcggaggggcatgcgggagagtcgctgatattgaatcggctttggaggtcatgcgcaaactgaatgagcactatctgaatgccttcctgtcaaagtgcacggacaagaagaaaatccgggacgcctgggagaagggcgactactggatgagcgcgcaggaagcgaaggaaaacggctttgtgacggaagttacaggcaaggcaaaagtcgataaggctatggcacaaatgattaccaactgcggttacacaggtgaaattgagattactgactctattaataacgaaaaatcaaaaaatgacatggatttaacaatgttgactacccgcttcggaatggacgcaagtaccacggaagcacaattcatcgcacaggtagacgtgtggaagcgtaaggcagaccgcgtcgacatgctcgaaagacaggaggaggcacgcaaggaacaggaaatcgaaaacatcctgaacagtgcgatcaaggaaaaaagaatcacagccgacgttcgtgacgactggaaggcgaacctgaccagcaatttcgataccgcaaagaagctgctcgacgctatcaagcctgtggaaatgccggaagttcatgctcccagtctgacggataccacaaacaaaaagttcgaagaccttcaaaacgatccggaggctttgaaaaatatcatggagaagaatccggctgaatacgaacgtcttttgaatgactacataaagcgtaacggaaaataaaatactaaccatttaaaaaaaagaatatggcacaaccagtagacggtctttatttgaacaagtacgtcgatccccaactgttgatcgaacgtcgcaattacagggcggacttcatgcaggtcttaggctctgttcctgccggagctttggctgcggacggtgtacgcagaaacaaactgattaacaatgtcggttttcgcgtaaacaacacggaagatttcgagccgaagcaaatgaccggaaagaattatatcgtaccgtgggaaatctacgatacggaacccagttcctgtacggatgacgaaatccgttatctcgcttttgacaagcgcgctgctatccgtgtgaagcacaatgaagcctttcaggtcggtatccgcaaccatgtgctgcacaaactggctccggaggatgattcaaacgaagaaatgcctgttatccggacaacgggtgagaaagatattaatggtcgtttgagactgtcttataaggatctggtcgattttgcaacgctcgcaaagacgtggaaccttcccgttaccgatgccctgtacatggtgctttcccccctgcacatgggtgacttgttgctggataaggatgcgtccaagtacttctatgaccgtactttctaccttgatccggcaaccggaaaaccgaaaggcttcatgggtatcaagttctttgagaataacgactgcccgttctataatgcggaaacagccaagaaggtggcggaaggcacaaaaccgtctgccgaaacggactttcaggcaagcacgttcttctatgctccgaatacgtattaccacatcgaatccgtgaaatccctgtatcgtccggaaacgaccgatacacgcagcaagagtcctacatccgaatatcgtacccaaacctacggtattgtagaccgtattgaagatttcggtgttggtgcaattttatcaggtaaatccgtataacgaattattttatgggaaattttacaggagtaatcatcaacaaagttaatggcgggctggtacgggataccgataccagtgaccgcatcatcttgctcgtggtcggtggatcggagatcggaaaacttgaatattacaagccggaaaacctcaacgacattaccgatttggaagcacttggttgggatgataccattgatcttgaaaacaaggaactggtgcattaccataccagcgaagtcttccgcctgtctccggaacgttcgctgtatcttatgctggttccgaagtctgaaaaagtgtcaagcctgctgacgaaggaagatttcgtcaatgcggtacgtaccatcaacggagtaaacaccatcggtatctgctcactgactgcggacgaaacaatcacagtagccgtacaagaggcacagaagatggtcaataaattcagggaagaccacctgtatatcgatgcggtaatattggaaggtgtcggaaagtatatcaatgccattgccgatgctgtcgacctccggaagttggatgctgaaaacgtctctgtcgtgattgcacaagacccggcacgggcggcaaaggatgaagcataccggacacacgctgccgtaggaagcgcactcggaatgctgtctgtccgctatgtacatgaaaatatgggcagtgttgatattgaaaaccacccacggacggcaaaggggacaaaggactatccattgactgacaaactgaacgggctttggctggatgcagccttgagcaatggcaaacccttctcacagttgagcgtatccgaccagaaaaaactgactgaccaagggtatatcttcgtcggcagctttcaagggtatgccggattctttttcagcaattcatgtacgtgtacggaagcggacagcgactatgcatatattgaatataacgctgtttggaacaaggcggcacgtattatccgcaataccttgttaccgcgtgtgagaagtaaggtgaaagctgacccgtcaaccggatatatcagtaataccacgatcagcagttgggacgcgcttgtcaaatccgcactggaaactatggtaacttcggaggatattgcagacttcgacatttatatcaatcccaaacagatggctgtcagcgacaagcctttcaatatcaaggtaaaactggttgcagacggtattgtacatgagtttgagattgacttgggtttcacaaataaaatctgaaaatatggcattgttaggaacattaatcaacaagttcggaaaaatagccggatggaacagcgtcaaggttgtcatgctcggtcgtcaggtagagggtatcacagccctttcctacaaagacagcaaagagaaagacaacatctacggtgccggtgaatttcctgtcggtcgcggtgaggggaattacaaggctgaagcatcgatcacccttctgaaagaagaagtgaacgccttgcaactgacactcggttcgggaaagcgtctcacggatatcgagccgttcgacattccggtcatgtatgagtataaagggcttgtcatgaaggacgtaatccggaacgtcgaattcacggacaatggcgtggacgttaaacagggtgataaaagcattgccacacaattcacccttcttcccagccatatcgactggaatgtggcaatgtagtttaataaccgtttaaaagacttttaaaatgaaagaagaagaaatgaaaatcaaggctggaaagccttacgaggaactgacaacggaggaaaaggctttgattgtcgatttcacagaggaagagcatacggaactgaaactgaaatacggaaaacgcctgaagcatgtcaccgtacaggtggacgaggatgaacgttacgactacctgatcgtccgcccgaaaaaaaacatcctgctggctatggcaaagaaaaaggatgatcttgaagaagcaaatgacatcctgatccggaactgcgtggcggctggcaatatggaggcgttggaagattctaccgtctatacttcagtcctgaccgccatcggacaactgattgccggacaggcggcttttatcagcaaagcatagaggaatattcatcagcgttcggtcttgtcgagggaatagatgccatcctgaaaaaagtatatggcttcgacatcccggacaaactggacgaagatgaatggctccggctctatgccgaataccgcatgttgcggaaaacggagttggaagaatttgaaatagtaatgcacaatgcattcgctaaagttgtaaaccgattattctcaaaagacaatgcaagtgactcaatggatattggaactggttgacaggatcacgtctccgctacatgcggcaaccgatgcagccgaagaagctacacgggtaatcgacgacacggaggaagtggttgaacgtcttggggagacatcgggaaaaacagccggaaaactggaagggctgggaaagggaatgttctttctcaaccagctgaaggaaggtgttgacaatatccgtgattcctttaacgacgccatcgaaccgggcgtccggtttgaaactgccgttgccgaaatgtccggtatcaccaacatggaggggaaggaactggacgttctcgccaccaaagcccgtaacacggcaaaagcgttcggtgtcgatgcgtcaaatgctatggtcgtttataaggacttgctttcaaagattactccggaactgaaaaaagcaccggacgcgctcgaaatcatgtcgaataatgtaatgacacttagtaaaacgatgcaaaatgacgtccccggagcgtctgcagccatgtccaccgccatgaaccagtataaggtttccctcgatgatccgatgaaagccgcacaaactatgacggactatatgaacatcatggcggcaggaactgtcgaagggtctgccgaaatcagggaggtcgcggaagcattgaaacaaacgggtagtgttgcaaaaacattcggggttgaatttgccgaaacaaactccctgatccagttgcttgacaaatcggggaaaaagggttcagaaggcggtatcgctttgcgtaacacgatagtcaaattgcaggctccgactacggacgcgatcaagcaactgaaagctgccggggtcaatataaaaacgatgcaaaaccagtccctttcactgactgaccgactgcgtgccctgactccggtcatgcacaacgctacaatcatgtccgcgttgttcggaagtgaaaaccttgcttcagcgatggctttgattgagggtgtagaccaaattgacacatggacggaagcgatacagggttctacttctgcggtcgacatggcaaataaacaaatggatacttatgccgaaaagcagaaacgtatgcaagcgtttatcgacgacctgaagatcagtttctttgaatttgtagaaccgattgcccctgccattgaagttgtgggaatctttgtaggcgcgcttgtcacgctcggaactgtcgcatggtctatttcgcagatcatgtcacttggaataacaaagattgccggggtttgggttgcgtcgatggctaaaatggcattgtctacaatcgtgggtagccggctgatttccgtcgctatcatgggtatccctgtcatcggctggatcgttgcaatcataacggctgtcatcgctttcgtggctttcctttataacaagtttgaaggagtccgtgtgttcctgttcgggctgtgggaagtccttaaaacgggctttctttcctttttcaagacgattcataccatccaaatgggaatcattgaaattctgaatccggttaactggttcagggatgactggagcattgacgacgtatttgaacgggtaaagaaagaagtgtttgacaacgctgtggcagtcggtcgggcatgggaagaaggcaaggaaaagggacgggaaagctggcggaacaaggacaaagtccccggacttgacaagttccagctggacaccgcaccagcggcagtcaacaaaccgaccaccgtcacaacctcaaccggggggacttccgggaaagacgtgggacttggtggaaaaggtggaagcagcgtgaggaatatcaccatgaacgtgacattcaacaatcatttcagggttgcggcaggtgcggacatgcgcgatgttgcggataaggtcaaacgggaaattttagcggtgataaccgatacagtaccagcaataggataaagttatgacaggaaatacagcgttaaatattggtgcattgttcacggaggtcttcgggatttcatccccgatttatcttccgtggggacgaaccctgcaggattacgatccggggaaatacatcggagtgacaacgattccggatgccgaagccgaagcatacagctggatggggactccggtcatcgggacgtttacccttgacggtaacaagcaatacagcacctataatccggacgggtcacgcggcacgatgaatatggctagttttccgatgccgtatgcaacgatcgtggacttttcgcgctcgatgaactgttcaaaaacgaaggtattgggtgttcacggaactgtaaaggaagtctacgggctcgacgactggaaaatcaatatccggggattctgcatagcagacaaaagccgggaaggttataagacggttgccgaacaagtgaacgcgctctgcaagttccgcaaagtgacggaagcggtcggagttacgggaagcatcttcaacaacaaggaaatttactccattgtcattgataacatttcgttcaatccgattcagggaaacagcagcgtagttccgttcacgatagaagcaacgagtgataacccttatgaactgacactatgagctatatgatgtgcagccggatcacattcccggcaaacaagagacgcgaggaactggtcatctatacgatttcgtcggttcacatcgaaagttcatggaagatgctgacagactctgcagaaatagtccttcccaggcgtatcaaatactttgccggaaaagacctgaaggaactgctgtctgccggggatcaggtgaagattgaactcggatatgattccaacctgtacacggaatttgaaggatatatatcgctgatcggctggggtgttccagtgacgatccggtgcgaggacgaaatgtataacctgaaaagaaaaacagtgtcctattccgcaaagaatgtcacactgaagaaactgcttgcagacgttgccaaaggctatgaggtgaagacgaactatgatgctgaacttggtgcggtacggtattcttccagaacggtcgcggaaatcctgaatgacatccggaagaaaaccaacctccactgctatttcatcggcaaagtcctgtattgcggaaatgtctattccgaaaaggtcgacaccgaaaaggtgaaaatcgtactggaaaaaaatgccgtcagtcagaacctgaacgaaaccaacggtgagtttcaggtcaaggttgtcagcatcggtgctggcggcaagaaactggaagcaaaagccggaacggaaggaagtgaggtctataacctgacttacaatgaaaaaggaaagtccgtcaaggtcgaagacctgaagaagttcgccagagatttctacgaaagccttaaaaagcagaagtaccgcgggggcgtcgaactgttcgggatacctgtcgtccgccacggtataacgattgacctgaagagtgaaataactccggaaatgaacggatactattacgttgagaaggtgacaaaggatttcagtgacgatgctacatacaggcaaaaattagagttgggaggacgtgcggaatgactacggatgaacagttacgtgatgcgcttgaaaaatggcgcgaaggggctagacaggcgcaattgcgctgggtaacggtagacaaggttgataaagaaaacaaggcaatggatgtgaccggggtcattgaccagcttgaatattatgatgtccagttgggaatgggtgcattatgcatctatccgaaaccgggaacaacttgtctggtcggaatcatcgagggacaggagactgacgccttcctgatttctgctgatgaggtggacgaaattgtgctgaatggcgggacattgggcggactggtaaaagtcggggaactgacggaacggctgaacctgattgaaaaggacatcaattcattgaagcagaaattgtcaggatggacacctgtaccgaacgacgggggatcggctttgaaaacggcattgtcttcctacatttcggaatcactaaaagagacacaggtcagggacattgaaaacgaaagggtgaagcaatgaaaggactattactcgacaaggatggtgatatcagaattgtcccccataagggaaaagacgggctgaccgggttcgtaatcggtgacactctgattcaaaatgcggcaatcgtgcttgagctgaatcagggtgagttgaaagaagacccggtgctgggtgcgaacctgatccggtatatccgttcacaggctgataaaagagccattgagaaacaaatgaaaatccacctgaaacgcgcgggcattgactattcggagctggtggataaaataaatattgaaattactaacgattaaaatgattgaaaatgaaagcaagtaacgatctgattaaaaagttcggagtagacaaaatcattcacggactgattgggatgctcattttagccgtgtgcgtggtagcatctgttttcctgtttggggtgagcttccctagcgtattgggcggcatggttttgggaactgtatccgcatggctggctggtaaatggaaggaatcgaaagacgatgttccggatatggcagacatccgggcgacggtacgcggggcattgttggcggatgtggtcatattactggtatggatagttttccgactgattctataacctgtatgtatcatgaaaagactacacgtacagttatggatcgcagttttcctgtccgtatccggaatgatcctgctgttttgcggattttgggtagtacctacgggacagattgacaactcggttttagtcgcctatggcgaagtttcgacttttgcaggcgcactcttcggagttgattacaggtataaatgcaagtataagaaatacattcaaggagaagacgaaacagaaaataaggaggaaaagaaagatgaataaacctacatacattatcattcattgttctgcaacacgcgaggacaaagatttcacagagaagcaaattaatgattcacacgtagcccgtggctttggaaaatggggataccactattatatccggaaagacggtcgcgtgattcccatgcgtgcggaaaacgaaatcggggcacatgataactttatcgttcccggtgagaaaaccagttataaccgatgttcaatcggtatctgctatgagggcggactggataagaacggcaaggcaaaggatacccggacggacgcacagaagaaagcgatgcgcgagctcgttcaggacatctgccaccgccacgacattattgatatcctcgggcatcgagataccagtccggacaagaacgggaacggcatcgtcgaaaaatgcgagtggatgaaagaatgtccctgcttcgacgtaaagagtgaatttacctcatttttaccacctgtaatcgttcgaccgtaatgaaaaagatactcgtttttttactcacaatcgtggtgctgtccgtctgttcctgccgatcgtccaaaacggacacgaccgtccatcaggataacacggaacagaagcagacggaacaggaagaagtttctacagacaaagcgcaggtcagcgtaaacaagaatgttgagcgaatgatcgagatgatgcagcaaatggaattcaactggcagaagacgaactattcgccaccggattcgaccgggaaacaatacccgacctccacggagacagcgacaggaacgtctaccagacaggagaaagaaacctataatgaacaacttcaggtacaaatacaggaaattcaggaaaccctgctgacattgaaggagcaactggaaaaacaggagaggaatgatacaaaggtcgttgaaaaggtcgcgtacattcctccgtgggcaaaagccgtaatagcagccttttttattgcatttgtattttttatttataaaaatgtaagatgaaaactgtagtacaagccggacaaaccctgctggacatagccgtgcaggaatatggtacaatcgaagcggctttcatgcttgccaggacgaacgatatgggcataacggacaccctacaagccggacaggaaatcgaaaccccggaaaaggtctataacagtgaactggctgattactgccagcggaactccgtttgtccggctacttctgaaaccgcctcaaatgcggtacgattgagaattttcaccgaacagtttaccgaacaatttaagtaatggctagaacaatcgcagaaataaagaaagaaatgacggatgcctatatgtcaaacagcattatccgtgacctgtatggcatcacgggtgatgccgactttgattcggtgttttcccccgtatcaatagaaagtaccctgttttacatttttgcggcaacagcgcacgtcatagagcaaatgtttgaccagttcaaatcggacgtggaggaacggattgacgccaatatcataccgaccgtgcgatggtatcatagcagtgcgctggctttccagtatggtgatccgctggtctatgatccggagaaataccagttccggtattccgttatcgacaaaaccaaacagcttgtcaagtatgtggcagtcaaagatcgcggaggaagtattcagatactcgtgtccggagatgagggggggcttccttgtcctttgaccggggacgttctgacggcatttaaaagctatatgaattcgatcaagattgccggggtaatcttgtcgatacagtcaattccggcagatgacatccgtatcaacgcgaccatagaagtcgatcctatggttatcaacgcttccggtatccgcctgacggatggtagtaaaccagtacttgccgccatcaacgattatctgaaaggtatcgagtatggcggtaaattcaataagacaaaacttgttgacgcgatacagagggttgaaggcgtactggacgtcgaacttggagaatgtgccgcaaaagcggcatccgctacggaatataacgtaattaaaaataataactatacggctgtagccgggtgcttcatcctgaacagccttgaaacctccctgacttatgtggtatgattttgacattatcaaatacgcgcagtatgtgcttcgtccgtcattgaggaaaaggaagatatttgcaatcatatccatcttccttctccctttaatcttcatttacaccctgtttaaaagctaccgtaaacaggctatcaacaagctgaatataaacggtcaggtgatatatatcgagaaagtgctgaacgacaggtttttcttgaaaaacagggaaatatacatcactgatattgcgggaaaagaatcgtacctgtatcaccgcagggaagagcaaatcccgtcctacctgtataaacggggtgaaggagtgggaaagaaacacatccagcagcgcggtgaagggaactattcgggaaattacatggtgaacataccgtcgttcctgtcaacgtatgagaatgagattaaaaacttgattgactattataaaccagccggacgaacctacgtccttaaaatatacgaatatgaataaactgttatttaaagaaggcggacagccattttatttggatgatttggaatttatgcaagaatccacagcagacgtattgaaagccatttgttccgggatgaaactgggagagaaacatattctgttaagcgatccggtcagcacggaaatccttggttccaatacagtgtatactattgtcggaaatggatatatcgtgataggtgatgaagtttatccgataaaaccggatattcttactgtgcctacatcacaaccagtatactgggtggttgttcaggaaaaatttcaaaatgaaatatttgcggacaattccgaagcgcaagtatatgagcgcaggtatgtaaaactgtcaacaacatatacaaagtcagatatgtatgtaggcagaaatgatgtagtaacattcaggaacaaaatattggctattgtcacagattatttggacaagaccataatagaaaaggacatgaaagcccagttatccctaagtgaagtcgtttccggaaaagcagaaatcatataccgggcaaaacagacgggcaatgaaactgtctattttaatatcttggctgctgccaatacaggaacttccatgatagctcctgaagtgaacggcaaacggagattatgtacatttgattcgtctgtaaagaatatttccggagtgttcagtctatcgatgtcgtatgcagattcatgggataatccacaatcaatgattgttcaactcacattcgataacggcaactgttatatagcttcagcagatggcagcccacttgtccaaatgcctgcaagtactattttaatcgaggatacattaaagatttaactgataatggcaacaatatacgaattaaaaagacgggcacaggaactttcggcaaagaaagattccttatccatatcacctgaagaagtgggcggcttgattgatgaaacgctggatgtcatcaacgaagcggagaaaaaccagatcgggttggggattcgtaacacatacaccaccgtcgcggagatgaacgcggacagtacttccccggtcggttctgacggaaagccgttgaaattcggtcagatcgtgacggtgtatgacgagaatacccccgatgcagtcgacaatggtaacatctacgcctttcaaaatccggggtggaaacttgtctcaacgacaggcaacctttccgtatatgcaaaaaaagaagatgtagaaacggcaaagaatacggctgatgctgcacaaaagaaagccaacgaagctgcggaatccgctaaaaaagcgaatgaaaatatcggaaagctgtccgataatatcggcacggaatcggaaagcgaagacgggacagtatggggtaaacttaaaagcctttctgacgatgccgacagcacatcacaggacgtgtcttcattaatggtagatttcgtacatcactcaacagaacgcttcgacgaaatagtaaccgactcttccattgtgttggagcagtccaatgcgcctactgaagacggtaaaattgtatttctcgccagtctgggtaaatttgcctgcttcgttgacaacaagtattatccaagctggaaaggtgttgatgcctatatgaataccgaccgcacacacccgcacgagaataaaatatacctgttcggcaacaagacctacatctactttgccggggctttgctttctgccgactccgacgcgatacagttagccgcgtctgcggacttggctgcaaaagcggcaaagaaatcggctgaagacgcacaggctaccgcgtcttcagcattgtcgctggctaacaaagccctgtccgttatcaatgtcaacgaaatatgtggcggctctgtctattccttgtccgcagccattgccgcaattacggaaagggagaatgcggataatgtcacttaccgcaaaccgggtatcgtattgacttataaaattgctgaaggtgaatgggaatccaaacagtttgccggatcatcccttgaaggctttgccacagaagcgaactggacggacttcggtggtgctggtggcgacatgacgggcaaaggcgcagtgctgctggtcgatgaaattgcgccattatcaaacggatactatattcttcaaacggctatcgatgccctgacagcttacgagacggcaaatgaaacggaatgcatcaaacccggtgtggttatcatctaccgcaccggaaaggaaacattcgagtccaaacagttgtgcgcgtcccgtgccgattataatgacttggcggcatggaacgacttcggttctgccgctgggggaacagtcgaaaccgattccgaaatcatcaaggacagcgtgaacccggtagcaggtggtgcggtctatgatgccatgcccgtcgacgtggatggcgaacaggcggaagacggaacggtgcgtgtgtacatgaaggacgcggaagggtttccgctgggcgacggtttcacctttgcagtcggaactggtggcggtgggggcgttgccgggacaatcgtgtatatctatccgcaaaagacctccctgtatgccgcactcggaactgacgacctgacaatcaggcttgcgatcctgtcacgtaccggatcgggtgaaatggtttcatacaacaatatcgaaaccctgcaactgaaagacaagtcaacgggggaaacgcttgaaacgttcaacgtgaaccgggaaagttccccgtcagatacggactacacttttgcgatttccgttaaaagctatttcagcgaagcgatgaaccgcaagtttgtggtcgttgccaccgatgacgggggaaataccgcgcagaagacaatcagcgtcacggctgtaaacctgaaactttcccgtgtatgggctttgtacaaaacattgcaggaaggttcgggactcatcaccatgacggacgtgttcaaactgtcttccgccaataagtcaaccgttacggcacatatcaaaataggcgacgaatggaagctgatctcacaaaccagcgtggcttccacacgctcacaggacttgcaaatcaacgtttcgtctttgggactgaaacatggtgcatatactgtcaggattgtcgcacaggacgtggaatcgggcgtatggtcgaactaccagttctttgatgtgatgattgtcaacccgtcaagtcttatgcctatcgtggcgcttgcgcattccgaagaaacggaaacggcatggtcagtcaagaagtatgcaaacctgaacatcgaagtggcgtgctatgatcccagccatgtcgctaccgatgcccatgtcgaaatacacaaggtcgtgaaagttgccaatacctctaccggagacaacagtgaaaccgatacagtgctgactaccgtatcagtaggacgtaacagtacattcaatctgtccacccgtgtcgatggctttactattgcggacaatatcaggaatacgttgggtatttacgggaaatgcggtgctggggaaagcaatacgattgagtactccgttaacagttccgtcattgacatcaatggtgattccagctatatgatttatttcaatccggcagacaaggacaattcggatcaggacaagtcatggctgtacggactttatgaaatgaagcagaacgggttcaactattccacgaatgcctttgtcaccgacaagaacgaagggaaggcgttcaaggtttcggatgatgccaccgcattgtgtacttatcgtccctataaccgtaccaacattgagcagaccggatcgactaccatcatcaagataaagacgcagaacgctgccgatcctgacgcgaacgtcgtgtcatgctgggacgaagcaaaccaaatcgggtggcgtatcacttcaaaatgtgtgtacttcaaagcactcggaactgaactgatcgaacggtatttcaagccgggcgacatctacgagtttgctttcgtcattgaaaaggcaaatgcggaagaggacggcaaaggctataccaagctatattgtgacggtgacctgattggcgcatccaaatatacggcaggacaaagcgcgatcaaacagtccgaacaaatcagcttctccggaacagccggggaactgtatatgtaccgcttgctctcctgggaaaaggaaatggcggacgaacagattaacgatgaatttgtgatcggtaaatctgatacggacgaaatgatcgctttgaacaaaaagaacgatatcctaaccgacaataaaatcgacctgaacaaagcacttgaaatgtgcgactgtctggtcgaaatgccacacggggactataaacttgaaacgcttgacaacgtaacggacacgtccaccaagatatatacagacctgtatctgttctgcaaggacaaaggtatgagtcttattttcgagaacgtggaaacgaccaatcagggtacgacatccgccttctatccaacctataagaacaggaaatacaagctgaaaaaggcaattatccgtgcgatgtatccggaacgggctccgcaggctttgctcgacgcgattgtaaacaagaaaatcattttgcgtggtgagactattccattcgacaaggtttgcctgaaggtcaactatgcatcacccgacaaggtaaacaccccgatttcccgtatcaataacgatatgcagaaggctttgggcgaggaatatatgaccccagcgcagaacgcgtactatgcggatgaaaacaacacgctggacttgcgtacaagtattgacggtaacagtgtgcttgtcttcaaatcagataccggaaatatcaatgacgcgtacttttggtgtcgcggtgactggaacattgacaagggaaatccaccgactttcggcttcaaggatgttcccggctacaatgccgactgtttgagttatggcgacttcaccgaccttccggacgtgacggaatcctatttcatgtcccatgctgacgactacgatcaggatacgatctacatgctttccaaatcgacggacgcttcgtacaagttcatggaatacgtcgacggggcatggaaaaacactaccggaacaatctctttcaacggcaggaaaacggtcgttaccggacgtgtcctgaatccggttgaatgtgttgaaatgcttgattatgaaggtatgtgcatcttcgatgatatcgacaacttcatgactatgcagtcgacgcacagcaagtgggtgaaaggcttgtacggtgcggaactgtcaacggaaagccttgttcccaaatggacgatgttctttgaattccgtacaccggacgatgacggcatgaaccttgcctatgcgcttggaaagaagacaccgtaccactggaaacagttctgcgaatgggtgtattcatgtaacccgaagaaccgtatggcaggcggcaaaatcagtatcaacggtgcacaggtcagcgatacgctcgaaaaccgataccggaagctggttgaggaaatggacaagtattgcagcgtggcttctttccgcgcatacctagtccgtatcctgtatcattcaggcgtcgaccagttatcgaaaaacagcatgtgggctttgtacctctgcccggacggtatttaccgttggtacatgaaccacgattatgattcggacagtacgaacggaaagaataattccggtatcttcaaacttccgtataacgtgatgcttgacagcgtcatggagggggaaaacgtatttgccggacgtatgagcgtcgtttggcaaggcatgtggcgttatgatcaggtcggacttgcagcgaccgcggagaaaatccgcacatcgcgccttccgggtggcgagtccgctttctcctacgaagccgttctgcgtgaatcggaagaaaaagaccacctcttgatccctgcgatcgtcgcttgccgtgattccgtggcgaagtatatcaccaatccgggcggtcaggcgttcaacgtgatctccggtatgggtatcccttaccgccattactatgtgtctgcccgttatgacttccttgacgcttatttcggtgtcagcacgatcctgaaggcggataatatgtgcatgttccgcgccatcggtgaggacatcaatatcgaagtgaccgcaagcgagcaatggaaattgtgggcgggcttcaatacgccagccgcacaacagggggcatgggcggaagaagacggctcaaaggtgacattccatttcgacggttcaaactcatcgagcgcgatctatatcatcggtgcatcgaagatcaagtctttgggtgatttgagcactgtcaacatcgacggtacacaggcaaaagacttcactacgttgatccgtgtcgaggaactggtgttcggcagcaaacgcgaaggatatgccaacaatagcgtcacagacctcccgcttggtgaaaaaccgtacatgagactcctgaacgttgagaacttcaaaaagctggtatctcttgacctgaccggggcaacacgccttttgcgcctgttggcatacggcagttccctgcagattatcaattttgtaggcggctgtccggttcaatatgcggaactgccgaccaccatgacacagttcaagttgatgaacctcgataagttgagctataaggggctgaacgcggacacaggcatcgttgttgaatccatgccgaacatcaccacactgcgcgtggaaaactgcccgcttatcgacgttgtaaagatgatccgcgacataatcgattcgcaggaaggtaatgtcgtattccgccatatccgtatcacaaaccgtgatttcatcgggaacggttcggaagtgctggaaatcctgcaactcggtatcgggggactggatgaaaacggtaatcaggtagagaagcccgtacttaccgggaactatctgctggatgaagtcatcgagaactcggatatagaagcgatccggaacggcttcgaaggtctgaccgtcagcaccataatcgacgcttatatcaagatcatcgactggtttaatgcggaagcgtatggcggagaaccctattatcccgaagtcacattggataatgtgggtgaaatcatggactattataatggtgaaacctatgaagaataccttcaacggtttgcggaagaaaatatggatattaacgatatagtaaacagcaaataacatgagtacaaaagaacagagcgcaaccctgctgcgtctcaataaacaggaacaggtaaaagccttgcaggcggtaggctttgccgacattacggaaaactcgcgtgccagcgagttccctaaccggataaagtgggctaccgggttgctggacatgcgggtggcatgtaaccggatttccgataattccaaatggtattttacccgtgaggagtggaactcgttgactcctgccaacaagttgaagtttatccgtcgtggtttgtgtatccgggcacattcgcagtcttttgtcattgcggcacaagagtgttatgcagctgacttgtcttccagcttctattggggcggtcttggtaaagcgattgacgggctttccgcaaagatgctgggcaaaatgtacacctgcttcaccgggaaagaagatacacgcctgatccttgatgccctgaaagggacaaattcgaacggtgtggaaggcgcacccgctgcggaagctgccgtagcctataaagccttcacactcgatggcgacggtctggaggatgatactgaatggttcttgccttcttccggacagatgatgatcatgtatcgataccgtgaccaaatcaatgaaatgctgcgtgcattttggagcagtgacagcatgttcctgacggacaaatactactggacgagcacgtactatgatacgacaaatgcatggacgtgcaatttgaataccgggcacatgaacgtacagaataaaaatacaagcctgttgcatgtaagggcaacggcagaagagtaatccattaaaacagtgcatatttatgacagacaagaataatgaaagcgcattgcttttgcgcatgaataaagaagaacaggtatctgttttgcaggagatcggttttaccaacgtgaacgaaaatacgcctgccagtgacattgcaaaatatatcagatgggctggcgggctgcttgacctgtcctttgccacaatccggatcgaagacggtgtcaacgtgttctttactgctgaagaatggaattcccttagcgcaaataaccgttcaaaatacctgcgtgtaggtgtccgtatccgtgcggatcgtcgccagttcgtcatagcgaaaagcgactgcactgacgatataggcgggcgtactttcaaatggggggcatacggtacggacatccgtggcgttaagaattacgggaacggtaatcaagggctttatgaaacggcagacggaaagcaaaatactgatgctatcatagaagccactgcaggagtcaaggataattccggtgtcgtcggtgcaccagccgcagaagcagcaaagaactataaggcttgtacgcttgaactggacggacttgaagacaaaaccgagtggtatcttcccagcgaaggagaactcattaccatcgccaaatataagaccgaaatcaatgagttattatcctctgtatcaggtaatcaaaatataattacagccgactggtattggagcagcaccgaatacgacccctcgagcgcgtggtacgtgagcatgaacggcggcaacgtgaccacgggccacaagactagcgcaggcagggttcgtcccgtttccgcaatagattctttatctctttaactctttatctcttagatagttacgtttaattagccccggtaggggctttttaagttttaaaattctgaaaaaatgagtgttaatagtttgacaatcattaactttgcggagcaaaagaaaaattttaaaaatatcaaaaattaacatgggaaaagcagaggacagaccagtctatcaattaatgtatcggttattaatgttgatacttgatgcaagagacaagtttccgaagaattacaggtacgaattcggtacggaacttatgatgtccgcccttcgttgttgcgagttgatccgttatgcaaattcaagccttccgcgtcgagtggaatacctgaacgaattccttgttaagtttgatacattgaaactcttattaagggtatgtcgagaccggaaactgatcaatattcagacgacagcagacatcattgagatgattacgtcgattgaaaagcaaattatagggtggcgtaatttcaccgcttcccaggaaaagacagcttccgtaaagccagagccataatcttcacggagtttatgggagagcaatctaatttatctattgggcattcccccggtgatgaaccgggaaagactaagacagtgaatgctgaatcctcgaacgcgtggtacgtgaacatgaacaacggcaacgtgaacacgaacaacaagactaacgcaggcagggttcgtcccgtttccgcaacagataaaccgatctatgacatacccttatcttccatcgtgcatgcatttgacgtctgttgcaagaataaacgcaatacagatgactgcatagagttttcgtttgaatatgacacggatttggttgccgtgtgggatgctatcagatacggtcgctacgaacctgattattcaaaatgcttcatacggaaaaagcccgttcttcgtgaaatttttgcttccgcttatgttgatcgtgtaatacaacattgggctgatctacgccttgatcctattttggaagagcgttttcaggcacagggaaatgtttcaaaaaattgccgtattggtgaaggagcactttcggctgttatctatctgaatgggatgatcatggaagtcagtgaaaattatacgaaagacgcatacattttcaagggtgatttcaaaagcttttttatgtcaatgtccaaatccctgttatgggaaatgatcgacctgtttatccgggataactataaaggcgacgatatagagtgtttattatatatattgcgcactgttatctttcaccagccacagtataaatgttataggaaatcaccgttacatttatgggatgagttgcctcatgataaaagtttgtttcatgctgatccggatcatggttttgcccccggcagtcttcatgcgcagaaattcgcaaattttatcggttcttgttttgattactatgtttccgaaatactgggaatcaagcattatgtgcgttttgtggatgatttcgcctttgtaatgcgtaataaagaagatattctaaatactgttcctttgcttgacagttacctgaaagagcagctgcttcttaaattacatcctaaaaaaatatatatacagcatcattctaagggagttttgtttgtaggggcattcattttgcccggtcgaatttatatttcaaaccgtgttgtcggtaatttatacgatgtaatcagcaaatataataaaatagcggaggaaggctttgcggaagcacacgcggacaaatttgttgccaccctgaattcctactatggattaatgaggcatttcaatacgtacaatctaagacggaaagtggcgaaacgtattaatcctgcatggtgggaatatttttatgttcagggacattgggaggtttttgtgttgaagaacgaatataattttaagaaacaattaaaaaaacaaataagaaaaggcaatgcgaaaaaatatcttaccccggaaattggctaagccgatcgaacaattatccgatggaacatggataatacgatatgcaatacaatccattgacagaaccgataacgaaggaaacgaactggtgacatttgccagttccatattccttgaaaaaccaacgttggaaatgataaagaaaagtattcatagatatgcaatgagcgttcttgatgatgaggatgttcttccgcttgttgccaatcctgatttatcagtttacatgatcatagattaaaattaaagcctgtttaaacgatgattaaacaggctttaattttgcaccaaaaatcacattttgttttatgttaatatgtgttttaatgacacattttgtttttcggtcgggaattttttgatttggcgattgtaaaaagagaaaggagctttgaacataatttattaaatttatatgaataaataagtgagtttttatccgtgtttctcaatatgaaagcaaagatataaaaaaaattaaataaagaaagaaatcgggcaaaaagattgaaaaatgccctattttctgtagaaatcacaatttcactccatcccaatgtattactaccacccactctttcggctgacaagttccgtaagaacggtgcggaaccgtagcaaccaccaaatcacaatgggaagatagtacaattcttaactccttcagcaacatatccatctgaataatcaaatgaagatatttcgtcatacaccggatcacccgtacatactgataaatgcacatatcctctccccgccttatctcccctaatgttttaggagagatagcgaattcgcttatgaaaaagctgttactgaaaatacgatccatatccattaaagccaataccaaattgcttaagaactcataaggttcctgtttttcttttgccatgtcattctatgattaataatttataatttttcagttttttatttgctttatcaagtgctatccacatagggaagcaaccttatttttaatatctcgacctttgttcccgttatctgatagtcaggtagctcaatcttacaaaaaacaattttatatgaaagtcttagaagaaatcaaagtctcggtttacgaaaatgtgtattcaaaaaagccccaagtcatgtctttccttgaagtcattattatgtgcattcatccgatctatgcctccatcataaacgctattcggcggtaccatgcagaaggagaccatgccgcggcacagaagctgaagaaccaactcccctgcttcactccggcaggcacattcgacggagcgcacgctatcaaaaactttcttctccccagccatattgtcggacttgattacgatcatgtaaaagatcgtcttcaagtcatccaacgttgtgcggcagatccccacacagtagcggcaatagaaagccctaccgacggagtgaaagttttcgcctatgtagaaggtatcgaaaaccgccatcgtgaagggcagcaactagtgagccgctactacaatcaactgctgggattggagagtgccccggcatgcaaggacgaaagtcgcatgtgttatttcagttattcccccaacggatatgttgcggcgctctatcaggcatttgtgttggagccacttataaaagaagaaacaaacactttctctgaaaatgaagtgcttcctccctttccccttcaggataatactccggaaaacgtgtctgaagaaggaaacgcccaatttatttcgtcctatattttctttcatccgctaacagccggtcagcgccattccaacgtcttcaaacttgcctgcgaagcctgccgccgacactatccccagaaaagcatattacgcgaacttactgtatttttcgagcacacggattttcgtcccgaagaactaacaaaggttttatcgtctggatataaacaagttaatgaacatgcacccgcttcctctccggccagcgccccttcttttcaaaaggacataaggacaaaaagacaatatagtactgcagaaaattccgataccgacgacgaagcctattggctgggagaagaattccgaaaaggaactcctttatttccccgcagtttgtacaataatcttcccgacctattaaatgactgtatcattgaagacggaagcgaacgcgaacaagatgtcgctctcctttccgatctcacggccttgagcgcagcacttccgcagactttcggaatttataatcataaaaaatactccacgcatatattcagtgtcatactttcgcctgccgccagtggtaaaagcatcgcccaaaccggacgatacctgttggaagaaatacattcagaaatcctgtctaccagtgaatctatgatgaaaaactaccaaactgtacataataactggcaatcagaatatcaaaaacagaaaaagaaaggagaagcatgctccgaagaaccgcaacgacctcctttcaaaatgctattcattcctgctactaccagctatacccgcatgcaaatgcagatgcaggacaacggtccacagggaagtatcattttcgacacggaggcacaaacgctatccacagccaatcatctggattgtggcaatttcgacgatatgctccgcaaggcttttgagcacgaaaatatagattcttcctacaaagccaacggcctcattccgatctatatacgccatcccaaattggctttgttgctgacgggtactcccggacaaatagacggcctattgagcagctacgaaaacggattgcccagccgcaccctgatttacactttccgcgaagctccgcactggaaagaaatgggcgacgactgcgtctcactggaagattctttcaaaccgattgcgcatcgtgtctccgaattatatcacttctgtctggctcatccggttctttttcatttcaaccgcctgcaatggaaccgtctgaatgagattttctcacgtatgctgtccgaggtggcattggaaggcaacgatgacctccaagccgtagtgaaacgctatgcttttctggtgatgcgtatcagtatgatccagacccgtatccggcaatttgaagcaaccgatctttctcccgagatttattgcacggacgctgattttgagcgttctcttcaaatcgttctatgttgttacgagcatagccggttgttgcactcatccatgccgtctccttcggtccgtccactgaagaatccggacactattcgtaattttgttcaagagttgcccgacagtttcacgacagatgaagcgattcagattggcgcaaaatacgatttcaaccatcgtaaggtaacacgtctgctaaaatcgcttaatggagtaaagatcaataagatatcccatggttcctataccaagatgaatgagcaatagtcacatctgtcctttttgtccttttgtccttttgaagagtccggaaaaacatcgggagatttgaaaaaaacatctcaatgattgaaatcaaacattgggaagtttcgatacaaatctcccgatgttttttctttttatctgtgcgcctgtgtgcgtcattatgcgtcatgccgctttcccgatgtagtacttttgtcatgtaatcgattacaaggcaattaaacaattaaaaattaatgatttaaaattaaaagttatggcacagaattacactctcatggctcgtaagaacctgttgaaacctagtgaaactccgaaattttatgcagtggcgcgtagcggtcgtaaagtgacggtcaaggaagtttgtaaacgtatcactgaacgctcttcttattccaaaggggaactggaaggttgtatcggtgagtttttgctcgaaatcgtcaatgtactggatgaaggaaatatcgtccagatgggtgacctgggtaatttccgtatgagtatcaagaccggtactcctaccgatacggcaaaggaattcaaggcatcatgcattgataagggcaaagtgctcttctatccgggtagtgatctccgcaagttgtgtaagacattggattatacattgtataaaagtgattcttccactgattcggataaagatccgcttcctgatgatggcggtgatgataatcagggaggttccggcagcggggaagctccggacccggcagcttaatcaaccggttgttgactggttcttgagttcataatgtatcagtagtatttattctttaattcaaatttatatgaaaaagcaactttggaaaaacattctccagtttattgtaactatcgcgacttcgatcatttcggctatcggtgtaacgtcctgcgtgggacattaatctcctgctgaccgatatggaaaattcagaagaaaactatctcccacgtgagattaagttgttggtgattcattgcagcgcgacgcgctgcaatgtttccttcaccgtagagcagcttcgacaatgtcacctgcaacgaggtttcaaggacatagggtatcatttttacatcacccgtaatggggaacttcaccattgtcgcccggtatcagagcccggtgcgcatgtgcgaggtttcaaccggcatagtattggaatttgctatgaaggtgggttggatgaagaaggtcgtccggcggatacgagaacacaggcgcagcgcttcgcgctacttgacttgttgacgattctcaaacatcagtatccggatgcgcaaatcctaggacattatcaacttagtgcttcgattcataaggcttgtccctgttttgacagtcgaaaagagtatatgaatatataaaaagaactacgggagctcgcgaaagtgcagtctcccgtagttcttttttatgtttatatcatttatagttcccccggctttcccaagtaataagtaataagccgcacttctctcacagaaaatgcctttgtcttcggatgaaagtcagtagacagtatctcattcatcaatggcttgcatctcctcatccacctccgaagtttattgaccgaagcacgaattgtcaaatcaggaaaatacatctgggctaactcttgtttattataacatttcactacaaagtctgaatgttccatcgtttctttattactgttttatatgctataaagttacaaaaattataacatataaacaaagaaagaggagactattatccagtataatgagaataaaaagaaatatcaacgatcttcacagacagttgatatagtgggaaattcacatcggctttaacctccgatgtcagggcgtagatcagaaatacaccgtcgcgctatttctaatccacaatgtaggagaatcatgcctttacagcatgaagctagggacctacattttttcatctcacatacgaaacactcacgtgtttattacatctcaacattttcaacattcattttatacccaatttgtttcagaaaaatcatctcaaatacttattatcgttatctctataccaatcctcaattgcttcctcaaatgtatagtgaaacttatacccagaatcagccaatttctttccgcatatattagtagagatcattaacttctttacacgagccggacaaatacctaaagcttttccccctaacggaccgacaatatttgcaactgtcattagaatacttcccggcaccttaacaatggtacgttgtagtcccgtaacctttttcatcgtttctactatttgctcaatagtaaaagccggttcaaatgtacagttatataactctactccttcgctatgattctccaaccgataaagcataaagcgaaccaattctttcacataaatgcaagctttaatcgtatctttacggcccggatagaagaacttaccgccacggatcccccaatacaaacgggtaaagttaccattttcccctttaccgaataccacacccggacgaacaatagtaagttgtcgttcgttcggcttttttgcctgccaaatcgtatgtattttttcagccactaatttagaaattccataaggcgtgttcggtgtaggaagcgtctcttccgttttcaaatcttcagctgcaccataaggggctatggaactggtaaaaacgattttctttatcccaaacttttcggcaaaagcacatacattctctgcaccacgaatattcgtctcaaaataagcctgatccggatgtcccggagtacgatgaacggctgcaaagttaaagatgacgtcttcggaagttggagtaaaaggaagatgttctatggacttgcgaacatcacactcaacaaatacagaccgtagtacttgtcctccttttaatggactcacttttacagcaggtaatggaatatccggcctcacgatatcaaggttgtacacatgagcatcagaatactgttgttttattaaaattgtaagatgtgtacctataaatcctgtaccacctattattataaaattcatagcaactccttatattgtttttttatattcaagatttctttctcaatggtgaaattttcgacaatccgttgatgagccgcctctgcgaaatcatttctttttttatcatctgacaacaatttatctattgccttggcatatgctgcaacattcctattggggacttctaaacccgtaacttcatgaagtgatacccaattaactcccgagccttctatcgtatatgttacaggaacagcattacaatacattgcttctgctaatgtcaagccaaaaccttctgctttcgtataagaaggaaatgcaaaaatatcagctgcatgataataacacttcttctcctgatcggatagtctacccacaaattcaaccctatttgatttacaaatagctttcatttcatcagttagtgggcccactcctcctatgaaaatatagcaatcattctttatcatctgttcagctttaatcaaatcctggattcctttatgaagaacatgcctgccaataaaaaaaacaatttttctccctttcgctttatcttttattctttgtatggtttctatatctccagtatttacatttaacttttgaatatctatagcacttggaagaatagttgttttatttctaaatggcaataaaggtttggacgaatcgcgataattaggtgacgtaggtgcgatcagatccgctttttttagcaatattgtttcaaaaggcttaataaaaggatatatcttcttttgctttgttatatcaaggtgccattgtacatacaatttcgtagtccttggtataataggaagaagaagtgctgttacaaaaggattaggataatgaaaatgaattatatccggcttccatgttttaataaccttatgtaaatgcctaaaatatgaaaaagacaaatcttgcctggctacactaagaaaaactcccggctttattatttgaattccattgatttcttgaacttttgttcctttatcctcactaaaacaaataacttttacttcatattcatctttcaaaccttcagataaatactggcatgtttgttctataccacctatatgcggtgtatagtaattcgatatttgtagaactcttctcttcattaagaaaactttaatatgacaagacgagatttacgagattcaaaaatgtttttccttcactagtccctatttttaatgatttctgtaccccggcattccgaccagcttctatatcactatcactatcacctatcatataagattgtgacaaatctatattaaattctttagctgcctgtaaaaatagccccggcttcggtttcctacaattacagtcacacttatattcaggtcgttcaccttcaaaccccttgtctgtgtgatgaggacatacatatattgcatcaacaaaagccccttttttcccaagttccgtttccatcttgtcatgaatagtctgcaattcttcaaaagtacaatcaccacgagcaatcacaggctgattagttacaacaatagccagatagcctgatttatttattaatttaattgcatccgtcacatcctgtatcagttcaaactgctccggattggtaacaaaccctgccaatttatttatcgttccatctctatcaagaaatatagctttctgcttatttttgagatttcttgcatataccagccctttcaacatatcagtctcagcctcatgaaaacgatcaggagtacccatatctttaacatattcaggggtatcataagcatatattttaccacttttgatattaggtttcagcacatcacgatctaaatctatcttgttgggattctcagggtgacgaggagtaaaattcttcattgtttcttttagaagttcaggagaaataatttcgactccagcattcactctgttcttatagtataatctctcatcctctttattcatccagcggattactctatgagtatcttccggcatacctcccacctcctttggcgacataatctctgtcaccaacaaagaactatcataaggatgcccgttaggatgagatattaaactagcccatgccttatgtgccttgtgaaatgcaataaaacggttgaaattcacatctattataacatcgccacaaagcaataagaaatcgtctgtcaattgtggcatcataaacaatgctccagcggtccccagtggatgttcttctacaaaatactctatatttactccccattttgccccatctccaaaatattcctgaataacttctcccaagtgacctataacaagaataatatcggtgagtccacaaactttaagattctctatctgatgttcaaggataggtttaccacatattttaatcatgggtttaggtatatcagccgcaactgttgcaatacgggtaccttttcctccagccattattactaccttcatatatttaattctaaaaattattcttttccaaaaaacgtatcttccagcatcaaacagaggcaatgataaacaggcaaatgtaattcctgtatcttataagtttctgtctccggaacttgaatacaggtatcagatatctctgataatttactatctttcttaccagtcagtccaattactttcatccctttagcttttgcaacagtcgctgcatacagtatatttttactattcccggaagtagaaataccaagaaacacatcacttttctttccatatccatttacttgctgtgcaaaacaaagtaaaggttcacagtcgttcatatatgcagtagttagagctaaatgaccatctaaagcaatagcagggagcgcaccctgtagattctcactcaacactctccccagctctttattaacagtaatcaatgcatccgaatactccgcttccaatcttctaggattaacaaagcccttcatcaattccccaacgatatgttccgcatcagcagcagagccaccatttcctgccaccaaaagttttccatcattagtataagactcctcaaggatttgatacgcttcaacaatacaatccttaacaacaatcaattgagggtatctcaaaataagaaggtctatgtattggtatagtcttgtttctaaaattttcatatatcggaatcggttatactataaattattcatcgaatgcacgttatctgtagaataaattttccagccgtgagcgcctccgtcactaaactggaacggcacaacaaagccactcattcttttaagagcctcaacaacctctttcttacgagtcggttcaacaataaacattataaatccgccaccgccagcaccagataccttacctgcttttgcaccagctcccatagcaacatccattacttcttggattacaggatttgttatatgagatgccattttctttttattctcccagccttcacgaagtatatctgcaaaactatctatatcgccttttaaaagagcaagtttcatatccttcgcactctgctttattttatgcatagcttctatcgcatcactattgccttgcgaagtgtttttcttctgctcatcgataatagcagcactactacgagaagcaccagtaaaataaagaaccatagaagcctcaagttcatctattatccaccgttttattttcaaagggttaacaataaccagatcattctgaagaaactccatatagttaaaccctccaaatgcagcagcatactgatcctgcttacctccagataagcctaaatccttacgctcaatttcatatgcaagacgtgacaactcataatcaccaagaggtaaacttaaccattccacaaatgccttcaacacacacacgaccattgttgacgatgtaccaagtccagaacctactggagcatcactataagttgtaattttgaaagactttatctccaaatcatatgttcgaactatacggttatatactcctttaattaaactagcctcaccatctatttctaaaacctttgaaaatggataacttttatagcaatgtgcatcaaatgcatttatttcaatcttcccattttcagtttcctctattgtacaataagcatagagattaatagtggcattaagtatcaatccaccatatatatcactataaggagatacatcactacctcctccagccagtccaaggcgcagaggagctttactacgaataatcataaatgtgtctttattttatcgaattatgattttaaattatttaattcctgttcaaacttatcaacaacagctttccaagtaaagttctttcgaatattttcataaccacatctccttatttcctcataacaagaaatatttcgtaacgcatttatgcaaatatgtgcaaattcttctgtagattcagctgtcaataactctttctgattccgaaaagttgttccttctattcctttaaccgtcgaaataactaatttaccatgccctagagcttccaatacttttactttcaccccccctccatgcctcaatggtactacaatcaaatcggtttgtttgtaataatcttctatattatcaacggtacctgttacaactatattggaattattctctgatagttctaataattctttgtatggatctttacctacaatatagaatttggattctggaatctctttttgaataatgggaaagactttattagaaaaccaaattgcagcttcggcatttgctggataggacatttttccaaagtatgaaataatgttccgattatctctattctcctcatacttataaatctccgcacctacaggaactaataaagtgttgactctcctccactttctctcaaagaaaattttatcttcaatggagacaaatgtaaataacttaatatttaaattcttatagcatttttgctcaaattgatatagccttttagcttctatataataaagtgctctcctccacggattgtcaatgctatttgctaaattatgtaatgttacatattctacattatgttgatttaaaatcaatttattagaatcaaatatttttttactaatattgcctagcatttgtggaaaatccactataacccaatcaatagtttccttttcaaaacatacatttaaatcaactttcattgttgttatccagcgagatacacatacaaaaggtccttttattaacttaaacaaggcggtacctttatttcttttatagaaatgtacttttttacaatacttcgataaaatagatgaatacttatattcattatcattatctatcacacaaaaaaaatatatttcattatcctttgaaaaatactccaatcttttcattatccctatccttcctccagtattagcaggatatgggcactctggtgaaacccaaattactttcattttatctccgttttagcaagatttatcttttatccttttatccatatcaatcatttgtatttaatgatttacataaaatcttctgtttattaaaaaaatcccccccatgtattcttatttttatcggcttatagtcattctttattcttatatggacaaaaaacaaagctattacacaataatctaatccagaagagaataataattgaacaataattagaatcaacaacattttgaacaaagaatttcccttcttaatattagttttagaacagctataaagttttacatagtttttaatgaaaaagtatgttcctattattccccaatatatactactttgtcccagaaaagactttgctgctacagcattgtcatctccactagttgctaaactgatcacttcatcagaacgcaatggcatatttatcatatcaatgaggaatagattattccgcatcatctctggaaataaatacatatatgtctgaaatccagtacctaaaggaaaacatataccaatagaataacctatgaatattgaatagaatcgtgtaactacagatgtataattttccaaatcattcatagaactttctattaatttaggaagaatgaatgacgctacatagcctccaccaattacaaatcctgtcattactagtaatcctttaaaactaaacatatattttgccctctgaaaaaaaagcaaaatcccagaaatacatataatcgccaataatgtctttgaaccagataaagcaatatgtagtcctgcacatatcaatacccccaacaacaaaaatttactttgtcgtacataataagtataaaatactgataatacaaaaaacacttctaacattaatgctgttgcagaagattctggagtaagcaatcggattctataataaatatcagcgtgtagcgtgtgaagatatgtgaatgcataaggagattggtaaaattctatcagtaatattattgttaatccaacaaagccccaaaagaaaggcttcaaaattcgttctatagtataatcccccgcaatattaatcaatagtagtaagtaacaaatataagcttgaaaagtgagccacagcttcactaatttcacgaataacgattcacccaattgtgtataactaatatcaaataatggatatataaaaaatgctatcaaactcaaaagcgttgtaactttgatgagaaaactaaatttcctaacaaaactatctgttctattaattctatttgttaaagcaaacaatatatataaacaaaggctaatacttggcaacattgactcaccaaaagctcccaaataagttgataaaggagaatctgtataaagtgtcagaaatataagaaggctatatagccaatataatttattgttcgtatgcaacattactatttactgacatcatcaatttgatatattataaattttatccaaaagtgactttggcattataaacttcactatattactaacataaaaatgaaacaaatcaacaaaatacaaccaatagcgtttaaaaaaagaatacccaaactgtctatgaatatctaatacttcttttcttgattgagaataattattatgtgttgctccattatccaattcgactaggctcattggaatgccaacatgagcgaatattcttcctctcaaaaaacaatctaataagaaattatagtcagctgctagcctccattgtagattaaatccatttttcattatttggttccgaaccaaagtactttgatgactaaataccatatgatttataatctgctgaatattacctgcttttaccatacgctttccaaacttatatttgtaaatcacatctccataaagaatgtccacattatcatagaagttattttcaaagcacttactcaagacttcattatctataaacaagtctccagcattcataaaattcacccagtttccagttgcttttgatatgcctttattcatagcatcataaattcctttgtccggctcactcgtccaatatgctaacctattagcatacttcttgataatatccaatgtcccatccttactaccaccatcaatgacaatatattccactttatcatacctctggttcaaaacggacaacatagtttcttcaatacttacaacagcattataacatactgtaattactgaaataattggtgtatccataatctcaaaattctctgctaatattattagccacatttaaacatccatcctatctattctaaggaccctattttatactctccttcagcattctagaattactaagtactaacctgtatgtatttactccagaaaatatcagattcccatttttcaaaagcatggcacccgaatggcaacttcccatttaaatcatataaataagatggattcacttcgaaagaaaagtaggaagcttcttcacatgatggtaaatttgctcttaccctccatgcatgcaatgcccatttactaaaatagaagtcctcattcaccctacctgatttaatgaaatagctcaatgtattcctaaaacctaatgttttaatacatgttttacacaaaacaagtaataataaataatatttacccctattaccatttatctcttctgttgaatacattttccacaaatatcttgtagttaaataaggaagccatttccatctttcaagtaattttatgcaatactgtattctacgtaaagaaaatccaccattaccaacagccaccatctctttgctatacaaaggatttgttcctttagaagatatattcttaaaaaagggactaccaatataatcatatcctttctcacaccacatttgcaattcattacggaaaacccatgcgtctaactggtatataagcatgtaatcataattacgaaatgccgaataaaaatcaatattataacacagtttattgtaaccttctacagaagtaaaaaagtgacgctcaaaacactttacactaatctctttagagtattcttttcctatccccatatagacagttaaatccaattcctcataagttattaggcataaatcaaaactcttaagaactctaatacattgtctaaaagaagccacctctgttactttaggagcggatttatatacaggaataacaacaatgcaacttttcatttctttatcaagtctctaataaacttaatccctttttcaccaactgtactttttatcccctctttaatttgatgtttcatagaagctacattcgccattatcttcaaagcttcattctcatcaatatcccgagtaaaaacctcaaaaacacaagaattattaataaccggattgacaaaagcttccatgttggctaaaaaagtctccttagtatttgctgtaagatagtccatacctaaattacaagcataatcacgaacaagtgttggtgactgattaccatagtgtccagctgctgcaatatattgatttacattttcttcaaatatatgaccaggattcagatgatgagtaaactcacatcccttaccgttattcactaaaagaatacgcaaattatttcctaaatgtctattgcccagcgcattcatatcataaaagaaagccaaatcacctataacacaaaaatgaagtttattcggattaacaagcgatgctcctaacaaagaagataatataccgtctgtaccaaatcccccgacattacttgctgactggattgagtttgatacctcaaaaaaattccatgaacgaagcgaagtcagaatgccaaaatgaataattgaggactccggtattttaggtgccaaagtttttgccatccatatattggaaagaggaagttctggtaattcatcatacattttattataatccgcccggcattcttgtataaaagaaatacccggacaacaatctttgtttgcgtaggattcaaaaaaatgcttatcactcatttcaaaaagataagtaagcttaccataacggtcacgcaattgtccatccttatttacacgccagacctccttagcataagctcccatattgaaatggtcacctgaaatttcacctaaatggataagtaaacgaatattatctaaacatttagctcctttcaaggaaagcagtgcatccaactgtcgaaaacgccctttgtaaccacttgtatgatcacaaaaaacgactgcattgtggttttcgcagaaacggtcaatactcattgttgcatcttcggtaaacgttcgatgggaacctataaatatagctatccgaccttgtggcaaggtaggtaattcatcatcatacgaaatacgttttactacttttacaggagacagacaagtcaccgaaagatcacggctatacaccgtttccaaatttatatgcgcaggacctccaccgtggagtgtcaaagccgaaattgcttggttgattttcagcgcagcactatcagcatctttatcatcacgaactgtaggtatataagtactaaacgttaaaatatcattcggatgcatactacgatcggtcacttggtcatataaattgcccaaacgacgtaaatcctgggttcctgttactaccagaataggcaatttacgatagtatgcttctgtcaatccaggcatataattacgagctgctgttgctcctgtacaagtaatcatgacaggttcgcccgattcctctgccataccgcaggccatataggccgcagaacgttcatctaccgatgaatacatttcaaaacttccatcatacattaatgaagcattcaacatcatatttgtgccacctggtgaagtaataacccgctttatatgatgctctttaagtaacttaacgagaatctgtattcctttttcacttgaataatgagtattcatactttttctgattatgtataaaaaatggtaaatgtgtgatctttagcattaaatcagctaagctcttttatttatgtttcatttgcttgcagaataacgcgatttttcccacagaaacaggacagaaacgatacataaaataatgtaatctttgactattagtagcaaactgactcaaagacataaactcatgtgaataatgatcatgaattccttctgccctacaatctaaataattaaattttggattatccaagaatgaagtaatacacttggcaagtccctctttggggtgtataaattcataacctcctactgcttcttttatcttagtattatcaaattgacgattatagtgaagatcatacaaaatttggtattgtgctatattcacatcaagttgaggacagcgatctatttccacgacattaggacgataccccattttattttctaaaacatttaaataaatatccagtacatccatccatttaatatttttgctagtaactatattaaaagtatctcccattgcctttttattccctatcagtttggcaatacaaatagcaacatctctagcataagtaagagtcgtagtatggctcataacatccataggtataaccgcagaatgtccttgcagtatgcgctgaataaacgtctctttatctagtgcccccaactgtaatcggatttcactataagttttatatggacgaataattgtaaaattggatttgcaactatttcgaagtaaatcttcctgacgggctttacaaagagcatattcgtcagttgccaaatatttcttatctgtagtaacatcaagtaaacgcggcgattcttctgtaatcaatgccgcatctgcataaacacgtgaagtactaagataaaaatactggtcggtattattaagatataaccaatatctatcattaaactccactgtagtataaatcataaagtcaataataacattgtagtagttctgtgccaataatgactttacaaaagaaatgttatgaacgttaccttttatataatgtatatttgttctatcagctaactcctgtcgtgaagtaacatccactttcataccagcttctgccaaaatagaaaccaaatgtgtccccattgccccagtaccccctaaaactaatactttcatatttatcctattttttcaatttacctatcttttctacaaacagtgatttaaaatttttcacaagccaagcaataaaaaaaactatatcaaatatcaaataaccaaacctcccccccctaaaacgtcttcgtttatattgaaaggccgggtataaccacaagtttgtgcacttctaataactaaatggtgacagataataaaaaacatagctaccagcctcaataattctaaatttgattttcttaaattattgtgcctaaatattttctccttatttttcattaaaaagtattggttaattattcttcaatagcatttcttagataagcaatgcattcttctcggtcatgaatcacttttaagtttatcaacttataagaaataggttgataaagcttcaaatctttattctcatatatgcgatgatccaatccataatgctcaagaacatcataaatacgcgaattttgagatttctcatctgcatcttgaaaacgtttcaaagcgataaagtctttctgcaaattgatagaaagtgctatcgcatgaaaagaatcggtacaaatgcaagaagcacaagacagcaaacgaacaaattccttaggtccagcagcattgtatatttgtgcatgaggtaattgcatatgtttattttccaaagacggaataagaataactttttctatacctaagtgctgttttatatcctccacttgctgttgatacgaagaattattacccacaaaatagcacaaaataaaatgaaacggcatttcaatctcaatatcagccgtcattgcaaaatctaaccattgagtagatgaaagtaaaaaagtcgggtcagccacttgaacaatatcagttctttccaacaattcaccaataatgggaacagcagtactttcacgcacaccaatatggctaaattttgcaagcaattcctttacaattgatttatacgcttgaggaaagtcccccgtacccatactcgaagcataagcaacccttttgacgtctcctgcaaaatctaaaaaatagaaaggagcaaaaccattataacaattccaaatctgatcactgccagtaataaatatctgcgtttcttggagcaaacatcgatactgtctataagtcttaattatctggtgacaataattctttttattaaactgacgtatttttttctgcttctttgagaaatattctcctttgattatctgtgaaaataaaattcgattaagtctcaaccatttatagattcgcccccgaaaactgaaatcatcgggtgtaaaacaatgaagcattgatacattataccccatttcactaagcttcatatgtagtgcataagactgtaaacttgtaccaaaattaccagtaccaagccaagtaacaatacaaactttcatctataattccttactataaatatgatataacttattccttataaagcctaccacctgtacacgttcagacttctgcatacctatataaaacatagatactaccagtgataaagtactcacaaatccaactgatatcaaacgtaaaaatccttcacccataatattatttagtattatcggcaatataaacgacaatactgtaacggaaacgatacgccctatcacctgcttcaagaaaatatttataggaaaaccgatttgtttattcataagaataagacgtacatagacaagacaagtgtaaattacgatatatgctatataagctgaatatgcaggccatccccaataaaacaaaaaatatgaaattggaaatacaagcgctcctattaaactcatatatatataatatctccgaatatgacctatggcttgggcaagaattgttaaaggagcccccggaagatccactaatattcccaacatcgttagctgccaaaacacaactgtttgatctggaaattctttcaaccacaaatgaagtatataatttgcctctaatacaaatggtatgaaaaaaaaaagcattaaacaatatgagtacttagctccttgacgtaccgtagaaaagcaaatatcaagattattatctgcataagttttaataatctggggattaagcgcagttgtaaaattattaacaaattgccgaactgcattaccagcctgattagcgattccacgagctgtattaatagttattccaaaaaaaagattagatagaatatccaccccattcgtattaaacaaataagctcctgtccctaagaaattccaccccgcaaaacctaacatattcttcaacaatgatttgttcaacacaaatacatatctacactctgtgaatttatgtgtgcaataccaaccatagatcagacgtatcaataatgaaactaaggcaagaagaaatgcataaaaaatcaatttatcaataggtgatataaacaataaataaacaacacctaatttcaacgacgcttctaataaagatatatatgcaaacacatccatcttttcataggctacaattaaagcattatatggtaaactaatgagattgacaacaaatgtaaataacgaaaactgcataacccaatttgcagcatacagtctatccgatggaatattcaatcgataatttagaaaccatacaccaactaattctaccaacagaactattataaaagaaattattatttgtatattaaggctcatagaaaagactgtacgtaacctttccatattatggcatcctaattcaaatgtgatataacgtgtaatggaatttgataatgatgcagaaaaaacagaaaacatcacaacaaatcctccaaccacattataaataccataatcttctattcccaatacatctaaaattactcttgatgtatataaaccgacacacatgacaataattgtgcgtacatatagtaatagcgtattctttactaatcggttattgctatgactttccataaattaatcataaacatatcttcttgtagacacatctaggtagctataatcctaatttccatcttaatacgcatttttctcccccacaatcacatttgctacagttttataaataatatataaatcaagcaatattgtccaatgctccatataccaaatatcagccttaacacgcccctccatttgtgacagctctttggtttccccacgaaacccatgtgtttgcgcccatcctgtaactcctggcttaatgaaatgtctcaccatatacttatcaatcagttgtgcataagtctctgtatgagcaagcatgtgagggcgaggccccactatcgacatatcacctttaaagacattaataaactgtggaagttcatcaatattagaatgccggagaaagtctccgaaccgggttttccgaggatcatctacagttgcttgtttactatcagcctcttcattcactttcatagaacgaaatttataacacttgaaatctataccatttaaaccagttctcatttgtttaaagaatataggaccaggagaagttaatttaataatacttcccacaataagataaacaattggaaaaatagtaatcaaaaaaattccagataacataatatcaaagactctttttaatacacgattttccattttacttagaggttcatagcgtaaattcaaaatcggcatatttcctaccatgctatgccaaattcgccgaggaaatcctttacaaacattaggaacaccatgaaaatagagcaaatgattctcgcaataattcataatagaaaaattatagcggccttgatccattgataaggaacaaaacacatgctttatagatatgtctccagacataaaatcggcaaaactatcaggactacccaagtaaggacattgagatgaaagagcatcattaggtccaatatcaaaatagccgactacttcataaatagatgccaaagagctctccatttcctcatataacatctgcatattattgcctccacctataaaaacagcataacgtttatgcttacccttagcacaataactaattagagaatgacgaataataatgcgatagatactcaatacaacaaagagaataaaaaaatagaaaacaaagaaaagaggagaaataatagaaattccgctgaaagtcataatgcatgcccaaaatactgaaaatgttataatattcttcagtacacgcaacacaagttgatccgcacggatttctctactatcccaggcttttccacgggatgcagaacatgccaaatagcagagactaagcgaagtcatcatcaaagaaacagtacaagaaaaaggcgaatatatagacgctttttcccaaaaaagaaggagttgaaacaagctaaagtttaaaataatcaaatctcccagaactgctattaattctactactttatttatctggttagttgacgccattgtcacattactaatgaatattaagctcgtattttcaaaaatttattaaagaaatcactcccgaataacttccaaaatatggcaaaacaaatagataagaagataaatgccaaaacatatatttttttactgatccccgaaggggtcaatggtaccacagcaggctctactacagcaaacacaggtttctcttcctgaactttggccctggcaacctgaagctgacttgccacctgactatatacctgataagccaggctcatatcgttctgtagccgttcctgttcggcacggacactctgcaatatgatattatcatgagaatctatataactagcatattccttctgtgcaatgtaatactcttgccgacgttctttgaatagtttttccaaataaatacagtcttctttcgctttggaagtacgataatcaatgatatattcctgtaattttttcacaacagaatcagcaacgactgcagctactttaggattttgtaaggttacagcaaccgtagtcatagatgttttcttatctatagtagcagtaatcattttctttaaagttctaattttcttcgactctttttttgatagttcaattatacctaaattagttctgcctgaaaatgtcgattcatcctcttcactaaacaaagactttatttcatcaattaccatacccggaagtcctattatataactccaccaaggaagagattcctcatccaaataagtattcaaagttgagttttcatctttcgatacaggtatttccatagtagaaagttccaataaaaaaggagtagaggagacgatatctgcagataaagaagcattcaaagcatcagtaccatcacccatagttactccactccctagaaaagaagctgccaaaccagataaaccaccttctttagcactacccatctctggagataaagttacttcaactgtgtactttttaggaatacttattgctataataacgccaaacattaaaccaatgccagcagctttataaattgtcttacgaatagcaataatcttacgaaaaatctccatcaaatcaatttcgatttcttcatccgtataattattatgtttttgttttatttcttttccagattctccttctatcatagtgatataagctgttattcctttatttttttattaaattagcaatagaagcaaccatcattcccaaagtactgaatgtagtagcataacctaagatatttccaatattagtccttttcttagccttactaggcacaattatctcacaacccggttcgatctgtttcttaccactacctttcaccttagtcacctgaccattcatataaacgatgaatttcttactcttctttgcattttcagaataaccaccagcctgattcaagtaataatctatattctcaccctctatatatgaaactgtattcggaaccattacagcaccattaattgtaaccgtattattatttttaggaatagaaatcacatcaccttcacgcaagacaatatctgctgtacctccaggattcgctaatgctttctccaagtcaataccaacactaaaggtatcttccacacgaacacccaaagagtccatcatagcctcacccaactgcctgctcatcaagcggatcacatcacccatgcgtttcttttcacttgcattggccacacgagtcaattttgcaccacgtaagtaggcataattcgttgcacctccagctttattgatcaagtccgaaagacgttcttcacgactggtcattgcataagagcctccgaacagaatttcaccttcaacaaccacattctgttgagcctgataccctggactacgacgtacataaacttcatcataaggttgaaggacaaagccgggagttccatctacaataaaaccttcttttagggagaatgtatatatctggccgatagtatcgttatctactgtactacgaggattcttaattctacgggatacatctacacggactacagaagcggcttcacgcaagccacccgcctgaataatcaagtcttcaagggtcatgttatccgcataaggataagaatcaggtttggctacttcaccgtggattacgacgttgcccctgtcttccaggtcatgaatactaggaatataaaggatatcgtttttcatcaggatgatgttttgggaagtaccgtccatgatagctttaatgtctactggaacaacttcggtagtcaagtcctcacgctggcggtagagaacggcacggttcaagaaagcatcaccggtcaggccttgggcttcgtttaccagttcacggacagtattcagttttccattcaactggtagatgccgggacgataaacggctccacggatttcaagtttgttgatgaagcggttaaggatggcttcggcggtcacaacatcaccgtttcgcattttatagacactatagtcaaggtctttgactgtgtttacttcatattcctgtccattctggcgtacgacacgcaaggaacgagtgtaggcgtcggcttcaaagccaccggcatagctgataagagtggatagactctcattctttttcatttcgaaacgcatggggcgtttcacttttccgtcgatcttaaccaatacatcataggcggggactattactacatccccttcctgaagacgaatgtcatcctgaatgtttcctttcatgataaattggtagacatcgattgtggcgatatttttgccgttacgtaccaactgtacattgcgaaggcttcctatgtcactgactccacccgcacggtaaagtgcatgaaagactgtggcaaaagaagagagggagtaagtgcccggttggacaacctcacccattacattgatctggatagtacgtatgctgcccaaagtcagacggatgtcagaggtgggatcattcgcattattaagaccattatatatcttgtttaatgtttttttgagatagtcattggcttcagcaatagttagtccgttcaggttgacaggacctattttctgaatgttgatcgtgccgtcaggagaaatctgttggcggatagtgttctggctggctccccagatatcgataatcacttcatcaccgggacccagacgatagttcaagggggtggcgatattgacactgggttcaaaagtaaggttacgggtgttgaaaatatttcgtccgaaaacctggttcccaagtgcgaggtcttgagtgctcgggtggtcttccagcatatcggaagtgttttctttcatttcctcacgaaggcgtgattcattgatgtcggtacccgttgcattggaagcattgacattgttttgctgctcatagagttgcttcacacgagttgcctgttctttggtcacacctctacgtgccagttcagaagctagttgtttctgttctttaccctggcggatgccatccttgacatattcaagaacttgggagtcgctcatattttgagccattaaaggagaaaaaactcccagcaacagaatgaatagaaatacgttaaattttcttcgtgttgtcattggtgatctttgtgggttctacataaccgattggcatatctacacaagcacagccaagcatatttaaacgaacggcaatcttactcttcccgcctacagtcacaagttcgccaacaagtccactcaaaggaccttttatgacacgaactttctcaccacgcgctagtggagtatcattcatacagactgcttcttcggaataatcgagcatgaaacggaaacgggccatctgctcgtcaggaataacggcaggagtactctctccacgcatcaccatataacggctgaccgtagaaaatgaaaggacttccatacgttcttttggattgacatgtacaaaaaccatcattgggagtaagactgtatcaaccatcttacgacggtcactccattgatggatttgttgttgaacgggaacaaaagaatcaattcccatcttagacaaacgctcggcaacttttttctcgtgatgcattcgaacgagtgctacataccagcgttttgagtgtgctacgccttcccctgtcccactactaggcccggcatttactgatttcggtttcgttaaaatcatatttttttaccccatgttcatccgttacttcttaggtaacggacaacacacatatagaatacacatcgctgtgaaaaaagaaaaaaatcgattatgagggaatataaaagcgggcacctaacattcaatataaaacattcttgaatttaggtaataaaaagcctttgagcatgaagatgttatccttcatgttcagatagatttatgttgcatattttagagaaaaaggaaaaaaagaagtttattgtttgtttgctattaatatttttacctatctttgtagcgaatataattccgttacctaagaagtaacaccagcattaagtccctaatccataatgctttaataatataaatcagagcattttaaaattgcaaacgtaagaataattcaatttatttacttttgttctttcttccaattcgaaaccctttaaatatatctgtgttgttttaatagatttgtgtcctagtgattcgctaatcatttcgataggtacacctctgtacttagcagtcgtagcccaagaatgacgaagcgtatacgacgtgacgggcgaatgtagccttaattttctggacaggcttttcaactcattattaaaacgtctcaaagctgactgatactcacgataggctccttcttcattccgcttgtacgctccgcttaatatccggaaaagataatcaggatagccagaactccgggcgtcagatttattgtacaatcccccaattgcattctgcgctgactccagcacttctatactcataggagtaccggtcttggtacgattgtacttcaaaagcccccgctccagattggacttttccaaatgggctaaatcagaaaaaggcattccacaaaactgaaataacagattggcaatggcctgcgtccggcgaagcttttccgattgaggatctttgtttaatagcatgtgaagttcgccgatcgggatagctttcttctgacgtgtgtccaccccggtaaaaacatcccggaacaaaccatgtacataaggagcctgatgcatatcgacaccacgattgtagatactacgcaacatacgcatatacgtagaaatcgtattgggcttcaaacgggaagccatcagatagttactatacctctttagagtttcacggtttatcttactaaacgtgatggattgagttccacaaaactgcgaaaaagaacgaatagcgtgtttatacacatgggccgtagaataacgcccctcttgtcgcaaacagtcgatgtaattgtttgcacaaatagtaaatcgatttttttccataaattataacttatctcatacgtgttattaaaaacgtgcggaatatagtaagattatagataaaatgaaccacgattttaaatttacttactgttttagatagaaattcaaattatttctaaaaaaaataagtgaagtcatgcagtattttcaataaccatgcatttaacttataaaagaggggaaaaagggaaatcaaaccatatatcattaaaacctacaacctgaacttaacaagtgaagtggggaaaaataaaaagagagagagagttttttatacaacgtccccaaaaacgaggaatccctgccaattttcgagttggcagggattcattttttatcttcaagaagatgatctttttacttgcagtatttggttatcaattcatctgcattcggatcacccaattctttcgctttcttaaagttgccgcaagcttcatctgtcttcttcagctgtatctggcaaagtcccaataaacggtaagcctcaccatatttaggatcagtcttcaatatattatttaaaatctgaatggcttcttcataccgtcctacacggaggtttacaactgcatgctctgcctggtaggtgaggtctgtcggattcatctcgatggccttggcaatatcgtctaaagcgcgttgaaactgacgtgctttcaaagctgcctgttcgcgataataatagaacacgtcgtttacttctcccttgactgccgtatggtaagcatcataatcgagcattgcatttcgcgcctgatcggcattcatattcatctgcgcacgttccaacaaatatggagcaaagtcgaccgtaatcggttgcgggcaacgggcaatacagctatccattaaggctaccacttctttcggatcccctttcagcagttctttcgtcttggcagcactaaagaaagtggccggagaagcaatattgctggtatttaccttttcataagcagccaaagcaccggcatagtcttgttgggcaaacagtatatcgccttccatttgaatgtaaattggcagcggatcaatagcgattgcctgacggacattcttcaaagcagtgtcatacgtccagtctttataagttttctccggcttcgataattgataagcatacattagcttacctatattataatatacatcatctttcttctgggctactttcagagcctgattaaagtcggcaacggctttatcataccaggtctgatcgtctttacctttagatgcataataattggcacgacggagataaccatctgcattggcagggaactggcgaatgaagtcatccaacagcttttcatagtcctcgcccgagaggctcgaagaggccatgaacagatacactaatgcctgatcttccgtttcgggtaaacctttccggataccaatgcttttcaaggcagcgtctcccaaagaaagagcactgattttctgcgacatggcaaaagctgctcccgccgcataacaagtagtcaccgtatcgataccggatgatttctgcgcaataccaaatacctgaccttccgcattcatcaccggacagctcaccatcttatctttcatatgcatgctcaatgtataataatggtattctccggctactttggaaacatctttcaccttaccagtaacgcaagcgatacttttttgtgtagaataaggaagcatccacgcatcggctcctgtcgccggggctgttttagcaacgaccagcgcaggcactttcttctcggtgatagccacacgaaacttaatgacatcatacatgtcattcgctccaagtatcaggctgaccggcatctgcttgccttcggaagtaatcactaccgcacgttcggctcctttaaaaagagtataatctgataaagccaatccgtcttcggacacaaagaatccgtttcccgtattcagcattttatcattcttgtcataagtcactattgagaagactgcacgttttgccttctctacccattttggggtttgtgccatgcttccttgtaccaggaagaaaagcagcaaaggtagaattaaaatcttcttcatatcagtcattgtttctttgtttcacagcttcgtaaatcaggataccggcagctacagagacattcagggattcgatagtgcccagcatcggaattttcacccattcatcacagagggcaaggttttcataagaaactcctgtatcctccgctcccattataatgcagaggggacctgtataatcagccttggtatagtcataatctcctttttcggtagcagccacaatgcggaaaccactgtctttcagatattgcagagtcgaacggaggttctgttcacggcatacaggaagagtatgtagcgctcctgccgatgtttttacggcatcagcattgaccgacgcactaccccggacaggaataatcacggcatcgacagctgcacattcgcaggtacgtgcaatcgccccaaaattgcgtacatcggtcactccgtcgagcataacaaaaaacggattttttccttgctcaaacaagaaaggaacaagatcctccgctttctgataagtcacagaagaaatgaaggcgatcactccctgatgatttttccgggtaatacggttgatacgctctaccggaacacgctgaacaggtatcaacgtacctttcaaagctgcaaaaagctccttggaaagatcactttgaatatctttcttcacgaggatcttatctatttcttttccagcctgaagggcttctatcacggcacgaacgccgaaaatcatttcacttttatctaacatctggttgatttactattttactatttactattcactatttatcagttgcgggcaagcagggatttggcattgctaagggcagcttcggtgagagtggcgccactaagcatatgagctatttcctctactcgttcttcgtcagtgagacggcggatatggctgttggtttccgtatcgctatctttcttgtataccttataatgagcacgcccacgggcagcaatctgcggcaggtgggtgatactgattacctgacggttgcggtcgcccatctcctgcatcatgtccgccatacggtcggctatttcaccggagactccggtatctatttcatcaaatacgatggtcggcagcttgacggctccggcaatcatcgccttgatagaaagcatgacacgggcgatttcacctcctgaagctacagaagagatattctgcaaggtgccgttcttattggcggaaaacaggaagttgactgtatcttctccttgcaatcccggctccttcttcagtcccatttctatctggaaacgaacattcggcattcctaatggaatcaaccgggcagccagctgtttttctacttcacgagcagctttcgtacgggctttggtcagcacttctgcctgttgtttcacttgtttatattgttcctctttgcgagcagtcagttcggcgatacgctcatcataggaagtgatgtccgacaatttgctgcggtattcatccgttagcgctatcaattcatcaagggtttgtacccgatgtttctgctgtaaggaataaatcagattcaaccgttcattcacttcgtccagacggaccggattgaattcaacggagtcactttgtaaagagacttcgtgcgaaatatctttcagttcgatataagcgctctccatacgttcggtaagttctttggccggctgatatactctttgcagattattcagtgtattcagactgtctttcagataagaaagcaagccaccttcatccgaagcaaacgactgctccacccggtaaagtccggcttttatctcttctgcatgacttaatgtttcagcttcctgctccagttcttcctgttcgccttccaccaaacaggcttcttcgagctgttcgagttggaagcggatataatcttcatcggagcgacttttctctgccagtgacactaattcagcgagttcgcgatctgtctgtttccattcgtcataacacagatgatatttcgccaatgcagcgtcattatgtgccagaatatcaagcacattcaactgaaatccttctttattaagcagcagattctgatgttgcgaatgtacatctatcagctgttcgcccagctctttcacttgtgccaacgaagcaggagtatcgttgatgaatgcccggctcttaccggaagactgcacttcacgacgcaaaatgcactcttcatcatattccaactcgttttcttcgaaaaacggacgcataccataggcagatatatcgaaacgtgcctctatgatacatttggaagctccgtggcgaatcgctttcacatcggcacgctgtcctaacaggagtccgatagctcccagaataattgattttccggctcccgtttcacctgttataacggaaaagcctgtttcaaaactgatatccagtttttctatcaatgcgtaattctgaatgtatagtgaacgtaacaccttctattttaattaaaaattaaagattaaaaattaaaaaccgggagacagggtggctaccagacggtcgatgatgtcttgggctacttccgtcttcggcttcagaggatagtctgtacgacctttcctgtcaatgatacttattttattggtatcatggcgaaaaccggctccagcatcattcaacgaattgagcacaataaagtcgaagtttttgcgttcgagctttccttcggcattctgctgctcattattggtttcgagggcaaagccaaccaataactgatttttccctttcagtgctcctaaattggcagcgatgtcttgtgttgcctgaagatggagggttagttcctcttctttctcccgcttaatcttcttgtcggccactgtttccggacggtagtcggctactgccgcacaaagaatacctgcatcagcatctggaaaatagatctgtgaagccgcatacatttcttctgctgattccacatctacacgccggatacgggaatgtttcgttttgagctgcacaggacctgttatcaatgtcacctgcgctccgcgacgggcacattcttctgccaacgcaaatcccatctttccggaagaataattgcctatgaaacgcaccgggtcaatcttctcgtaagtcggtccggctgtaatcatcactttcttcccggatagttcgtcactcgaagcgaagaattcatccaatacccggatgatgttttccggctcttccatacgtccctttcctaccaagtggctggctaattctcctgttcccggctcgataatgtgattaccgtaggaacgcagtatatccagatttttctgggtggcgggatgggcaaacatatcgaggtccattgccggagcaacaaacacgggagcttttgccgaaagataagttgttatgagcatattgtcggctattccattggccattttaccgatagtagaggcagtggcaggtgcaatcaatacagcatccgcccacaatccgagatcgacgtggctattccacgttccgtcacgctgggcaaaaaactcactgatgaccggtttgctggtcaaagccgaaagagtgatgggagtaataaattcttttcccgccggagtaattacgacttgcacttccgctccctgttttatcagtccgcgaatgatatagcacgccttgtacgcggcaatactgccggtaattccaagaattattttttttccttttagcattattttgtaatcaaattactcatttcacgcaaacggatttttgtcaatgccgccttagtgttcaacgtgaaatcactattcaaaatccaactgtaatatccgggatctttcttcaaaacctcggctacagacattcctttatattttccgaagttgaacacttccaccccattatcatcgtacaccatgcgtccggcaaagtctacattcttgctgaaacttgaataatctgccaggaacgcaatatcattctgaagatcggagtaacggtcgagctgtgctttcagcacttcgtaagtggcccgtgtatctgcttcggcagtgtgtgcatcttccagattcttgtcgcaatagaatttataggcagcagacagggtgcgttgttccattttgtggaagatcacctgtacgtctacaaatttgcgtttcgtcatatcaatgtccactccggcgcgaaggaactcttcggcaaggacaggaatatcaaaacgattggaattaaatcctgccaaatcgcaaccttcaatgtccctggctatgtttttcgccacttctttgaaagtagggcaatcgactacgtcggcatcataaatgccatgtatagcagaagatgcttccgggatatgcacttcaggattgatacgtaatgtttttgcttcttcatttccattcggatatactttcagatagcagatttcaacaattcggtctgtgttgatattggttccggttgtttctaaatcaaaaaaaacaatgggatttttcaggtttaatttcatttctaattattttttccaccacagagtaacacagagttccacagagtgttttatgtatttattgctctgtagaactctgtgttattttgcggtgattactattaatcatttagcatcatcggcatcagcagcatcagcaggtcttcgttttcttcctgctctaccgggatgattactccggcacgtgaaggatctgcgagttcgatgactacttcgtctgctgaaatattgttcaggatatcgatgaggaatgtcgatttgaaaccgatgctcattgctgcacctgcatactggcaaacttgtgtttcttcggcagaagtagagaagtcaatatcttgtgcggaaatcacaatctggttttcctgcatacggagtttaatcaaactgcttgcctgcgacgagaaaatagacacacgacgcaaagctcctaccaactgttgacggtctacggtcactttgtgcgggttgttctgtggaattaccgagttgtagttcgggtaacgtccttcaatcaggcggcaaaccatccggtagctttcgagcatgaatacagcattgcgttcatcgaattcgatcgtcactgtgccttgttctttcggcaaaagattcttaagcaaagtagccggtttctttggaaggatgaaggctgcacgctcgttacctttagctgccaatgtcttgcaacgcaccagtttatgaccgtctgaagcaaccattgtgatgtcttctgtggtaatatcgaaataaataccgttcatcaccggacgaagttcgtcatcggcagtagcaaataccgaacggttgatgcctcccagaagtacacttgcctccatttctacacggactgcattatcacccagtgtagccgattgcgggaattcatccgcattctgccccatcaggctgtattttccgttctggtactgcactgttatttcataattatccggattgatttcaaatgtaagtggttgttccgggatttctttcagtgcatcaagcaatgttttcgctactacggcaaaacgcccgtttgtatcgctttcattcacttctacggtagtcaccatcgttgtttcactgtcggatacagtcacagacaatgttccgtcttccaattcgaagaggaaacaatcgagaattggcagcgcattttttgaattaatcacacggctgatggcctgtaaatggctggaaagagcagtacttgaaacgataaatttcatatattttcgtgtatttaagttttaaatgttctatcgcacaaagttacgaaaaaagatttgggctgcccaataaaacaaaagaaaaaaacaggcattgtgtgaaggatattactaaaaaattgtaacttcgccccagaatttaaaattatcgcaatggaatttacaggaaaaatcatcgctatcctccccccgagaggcggagtttcaaaaactagcggcaacgagtggaaatcacaagagtacgttatcgaaaaccacgaccaatatccgcgcaagatgtgcttcgacgtatttggcgcagacaaaattgagcagttcaacattcaaatgggcgaagaactaactgtatcattcgacgttgacgcccgtcagtggaacgatcgttggttcaatagtatccgcgcatggaaagtagaacgtgttggtgcaggtgctccgatggcttccggttctcccgttcctcccccacctccgtcagctatgccggaatttactccgggggatgccaaagacgatctgccattttaaaccgaaagccattcgccggacgaataagcataaaaaactcccgataggattaaattctgtcgggagttttttttagaaaaacgattgtaaacaaacggtcattttttattctgatttatatttcaaaacaatgttaggatataccactccgtctgtacaggcaaactgaacaaagagggtgaaattatggaaaaaatcggcgttacgcagaaaaaaatccggtacaaaacgaacgtggttttctgattgccgaaatatgtggtcaaaatccgccatcaacataaagtggtatgaatcagacaagtgatccatgcctgcctgataggccattactccattaagcacttcgcctttatccagttggcgaatatattgtgacagagcattctcatcaggagcaagcaacaaacgcccgtcatagaacgccgcatacacatccaaagtggcctccacaaaactggtcagttgtttaaacaatgttgtttgaggcaaccgatagaccaagtatgccttatttacagtataaccaaaagtaatacggggagtttttcttccttcatctgccgaagcagtattgacaagggtacgaagcatcctttcagcttccgtcacatctgccacagacaggctcaagactgccgctgcatcctgcaacgtatcttcacgctggaagagacaggcaaccaggtcttgcccggcattttccatcagatagcgggaaaattccttatctctattctgcacttcactcgtgcggactgccccgttctgctcctgcgcatttccataagaaagtaaagacgcccagtccgtaatcccctgtctgctaaaatagaaagcagtggagggcagtgcttcacccgggaagcctttgactgattgctgctggcgaagttgttttataaatgcaaaacaagtgtctgcatcatgagtgatgccggagaaatagataaaatcatctttcatcttcatgtcaaattccgtccatcccatcatccctttcatacgggcatagattgtggcggtcgctgcacttttttttggagcacgcactcctgtaaaggtaggatcatctgccaatgatttaccactcttatatgcatcaataacgttttcaatcagttttttctgaaaacttaatgccataaaatcagatgtcagatagcaggctagaaaatcaccatctgccatcgggtaaatgattatttcctctcctttgtaaacaaacgttttcggtggataaagcgaagatatatatttacgcacaaacctgtttaccaattccttatccccatttcccaatctgcaataaagtacctggttccgttcgttatccggttcgtggaaactaatcagcatctgattcatttgccgactcaagccatggggagtatcttccgagagggcataaaggctttgtttcagataagaaaaaagtttggacacataaatatattgctgatttttactacaagtcagatcatcgacctccgctacaaactcgagcacatcatcggtaacaaatacggctgaagtggtggatggaaccagttcataaagatcaaaatctttctgcccttcggccgccgacagtctaaaaaaagagtacaatgcgaaacctgagcacaaaagtacaacagaagacgtgatcgctattttcactatcgtacgaagtttcataatattcgctgtttatcggctaggtgcaaaaataataatttctacaaagaaaacaaaacttttgctaaaaatttcaccgataatcaaagatagatatccaatccgtcgaatgccaggtgaatattttccggaaggctcttttcaacctccgcatgcaagcccatatcatgactcatgtgtataaagtacgtcttctttgcctgaatgcgctgcgccactgccaaggcttcttccaaattctgatgagtaggatgcgtggcaatccgaagtgcattcactaccaaaacatctattcccgccaattgttcataggattcttcgggcatggtcagcatatcagtgatataacctaattgcccgatacgatatcccagaataggcaatcggccatgcatcacacgtaaaggaagcacctccgtgtggttaactgaaaaagcctgtcccaccgagatttcctgcaaaggaatgtcgggaactcccggataacgatggtcaacaaaacaatagggcatacgcaagcgcaagccttgtgccacataattttccgcataaataggcactgaaccaaaccggcaaaacggacgcaaatcgtccaacccacccacatggtcataatgttcatgcgtaatgagcacaccatctatcttctcaaaaggaagacgcaatacctgtgtccggaaatccggaccgcaatctatcaaaattcgcgcatcatctgtctcaacaatagcagatgcacgcaatcggttatctttcggatcggtagaagtacaaaccggacatgtacagccgatttggggtactcccgtcgatgttccacttccaatgattcttactttcacttgttacttctcaatttattaagttaacttccgggtggatatcaatgccaaacttctcatgaacagaggctcggactgcatctgaaagcgcaagaatatcgctaccttttgctccaccaagattcactaacaccagcgcttgtttatcatgtacggcagccggacctaaggccttacctttccagccgcattggtcgatcatccatcctgccggaattttcacccgatcttctgccagctcatagtaaggtatccggggatattcctgctgcagggcttccagtttttctttcggcacaatgggattcataaagaagctgccggcatttcccattaccttcgggtcgggcaacttgctctcacgaatatcaattatcactttccgtacaacagaaagcgtcaatgccggatatttttcaagctcctgacgaatggttccataatctaacgtataatgttcttttttactaagtcggaaacggacataggtgacaaaagccgacttgttttccgggcgtttaaagatactgttgcggtaggtatatccacactcttccaccgaataaacgcgttcttcagcttgaatgttcaccgtttccacagctgttatcagatctttcacttcaacgccataagctccgatgttctgtaccgcgctcgctccgacctcaccggggatgagcgacaggttctccgttccataccatccatgttctacgcaatatgcaacgaagtcatcccatactactcccgctcccactcgtaccgacacagagtgttcatcttcctccgtcacttcgattccttcaatgcgggaatggagtatcaacccgtcgtaatctttggtaaacagcaggttactgccgccaccaatatgcaaaaaaggtgtcacaatggcaccttgcacaatcagcttcttcagttcttcaaccgaagaatattctaaaaaacgagcggcactgacatcgatgccgaatgtattgtagggcaaaagagaatacatatatttttagttataagttatactgttatagtgcatcttaacctgtatcagatacttgtatcttcaaacttatacaattcccattctccggctttccggcggaaataaaggatattggaaaaaccatttccgatacctttcaacgccaggattttcgtgggcgaatcatcgtcattccgctgtccgtaattaatattagaaaggcggtcgacaggaagtaccggtttgaaggcgaaccactgattaagatcgagggttgtctccaaaatggagaaatcatcgtccggatcactggttacaaaagccaacggctcccgcacacgctgactctgaaaaagactatccgttgcaaaatgtccgaaaaactcaacaaagttttcattatcactttgttcaatgggccgcaggttgattgcctccagtatccatgcacctttgatacgttcaaaatagtatcttttcaccattcgtgttttcacgaacatccactctacctgcacagaagtgagggaggtatctcctactaaatccatgtcttcttctctatcaaacagcagtgtataataatgctgtttggtaaacaagtcatcatgcttccagttgcgttcctcaatgtttgacttcttatctccattgtagtagggcaatggaaatttcacacgctgacgctgtaacacatcatcggaagcaaaattgtaaataaaatcatcgaaagattcatccgcctgtataggctgcggatcttccggcgatttatcatggtggctagaatcggctatctgccggactgaatccacctctttagtaatagatgcgaaggggtcaatatttgttttcttgtttccacaagagctcaatataccgagcagtatgacccctgcaattagttttttcattatttcagtttctctcttaacttttcaagcatatccaccgtcatgctttccaaattgtaggccggcttccatccccactcttcacgagcacaggtatcatccagactatcgggccagctatcggctatgcgctgcttcaaaggatctatatcataaatcatctcaaactgcggcacatgcttcttgatagcttgatatatcgtttccggatcgaaactcatggaagcgatattgaaagcattgcggtgtatcaatcttgccggatcggcttccatcagtgtgattgctgcattcagcgcatccggcatgtacatcatatccattaaagtgccttgcttaatggggcacacaaacttttctcctttcactgccgagtagtaaatatcgacagcataatcggtcgtacctcctcccggaggggtcacattcgaaataatgcccggaaaacggacagcacgggtatcgacaccgtatttattaaaatagtaatcactcaataactctgtcgttactttagtgactccatacatggtacggggacgttgaatggtgtcctgcggtgttttcgtgtgaggcgtactagcgccaaacgaaccgatagaactcggagtaaacactgcgcacccttgttcacgtgccacttccagcacattccacaatccatcgatgcctattttccaggccagcttgggtttcgactcggcaactacggacaacagagcagccaaattataaatcgtatcgatgtgatactcttttactacagatgcgatcgcttctccgtccgttacatcagcaatagccgacggtccggactcctttaattcccctttaggttctgcacccggaatataacctgctactacatttgcatttccgtaacgtttacgtagctccatcgttagctccgaccctatctgtccggtagctccaataatcaaaatgtgttccattttttcttctgacttagaatatcaagcttaaatagtgcgcaaagtaagcacttttttttcagattttaatcaaaaagacattgttattccaagaaaaattgtgtcctttgcaatataacttaatcacccaaacactatgtacggtaaaatgcaagaatatctccgccaaacattggctgaaatcaaggaagccggactttataaagaagaacgactgattgaaagtgcgcagcaagctgtcatcactgtaaaaggtaaggaagtattaaacttctgcgcaaacaactatctaggattgtccaatcatccccgattaatcaaggcttcgcaggaaatgatgaacaaccgtggatacggaatgtcttccgtccgtttcatttgcggaacacaagatatacacaaagaactggaagctgccatctcggactatttccagactgaagacacgattctgtatgctgcctgctttgacgctaacggcggtgtattcgaaccacttttctctgaagaggatgccattatctcggactcgctaaaccatgcttctatcattgacggggtacgtctttgcaaagcaaaacgttaccgttatgccaatgctgacatgaaagacttggaaagatgtctgcaagaagcgcaggcacaacgtttccgtattgttgttacggacggtgtgttctcaatggatggcaacgtagctccgatggatcagatttgtgatcttgccgagaaatacgatgcgttggtaatggtggatgaatcccactctgccggtgtggtaggtaccactggtcatggcgtaagcgagttgtataagactcacggacgtgtagatatttataccggaacgttgggtaaggctttcggcggtgcactgggaggatttaccaccggtcgtaaagagattatcgatttgctccgtcaacgtagtcgcccgtatttgttctccaactcattggctccaggtatcatcggtgcaagtcttgaagttttcaagatgctgaaagagagcaatgcactgcatgacaagttggttgaaaatgtaaactacttccgcgataagatgacggctgccggatttgatattaaaccgacacaaagtgctatctgtgctgttatgctgtatgatgcgaagttatcccagatttacgctgcacgcatgcaggaagaaggaatctatgtgacaggtttctactatccggtagtgccgaaagatcaggcccgcatccgtgtacagatttctgcaggacacgaaaaagcacatcttgacaagtgtatcgctgcctttatcaaggtaggtaaagaactcaacgtattgaaagcggaataactccgaagcaaggtttccttgcggaatctatattttaggcgcggattacacggatcacacagatttcacgtatcttacacagttgctttataacaagcttcattctaaaaaacgtataatacgtgaaatctatgtaatctgcacctaaattctcttttataaaatgaattttgaaccgctacttgactacaaaaaatagattatggaagaactgaccctcactactcctgccctacttttctcggcagtttcattgattttgttggcttacaccaaccgtttcttatcgtatgcccaacttgtgcgccaactgcgtgaccgctacgtggagaacccttcggatatcactgaagctcaaatcgagaatttacggaaacggttgaacctgacccgtacaatgcaaggactgggtattgcaagtctttttctttgcgtagtcagtatgtttcttatttatatcggactgcaattattttctgcttacgtattcggactggcactgattctgttgatagcctctctaggcgtatctttccgcgaaatacagatttccacccgttcactggagatttacttgggaacgatggagaaagggaaaaacaaaaaataacacggttgacaatccctcctattaagttttatcaagacactacccggcaaggaaggatgaccgtaaagcgacttcccttgcctacttcggatttgagttcaatccttccacccagtttttctataattacctgacaaatagaaagccccaatcctgctccctgtgaaaattcgttctgtttgtagaaacggctgaaaatcatccgttgttcttcgcgtggaatacctctcccagtatcttctacataaatccgcacatgcccctcatccggcagataaatataccctaatttgatatatccggtttccgtaaatttactggcgttattcaagaaatttgttagaacttgtatcaagcgctctctatccacattaatttccaaaggtatatcatccacttctttcaggaattccaggcgtggagcaatcaatacctggtgagtcatataaatgtcatcaatcagctctctcaccctacatttcttaaacgagaaagacatatagcctgattcgatacgagaaagctccagaatatcgttaatcaatttgagcagcaactcgctgttcttattaatagtgccgatgtattcttcgcgttctacggaactcaatccatcttccaatgccagaatattggcaaagccaacaatcgaattaagtggagtacgtatctcatggctcatatttgccaggaatgattgtttcaattctgccttttcagcgagtaagcgtgcagcttccagttcctcctcacgatcttttatatcttgtatgttgagcagcaaacctgctgttttatattcaccacccgaaagctgtttagtagtataacgaaactcccaccactgatagcctttaccgtcgaagttacaaagctcctgcacaatttttttatgagcacttttcagatttcgccagttgaacttcactccctcccaatgatcgggatgaataaagctcatgaattccttaaacgaaagttgtctaggatttaacccttgcgacgcccagaatgcatcttcaaaaacaaaacaacccttatccaatctccaagcatacgtcattccaccctcaatggctaatgacaatgtttctttttcatcagccaatgctataagagcctgttttttcctcatctgttcccgaagatatagccaccaaagagaagcaaaaagtaaaatcaggaaaagaacaaatgaagcgactaaggctccccacaaaaacggatattcatctctgaacggaatattgataatacgatagttagcaggaatactttccttactcaaaccaatttgcgtcattgtattccagtctacgacatactctttccggctttcaacaatgggtatatccgagggacttgcgccatgcaatatgcgaacggcagttttcacctcttcttctacctgaataggcagcgaagtgatgtatccacccaacaacttctcaccaaacccaaaggcttcattaatagctgtcagactaggactaccacagatactcccaatattaatagtggtgtaatcacgtttcaactggatataacattgatcgcggtaactcctgtttaaaacccacataaaggtagcatccgaatgatttctggcattacgcaaaggaatagccatgaaacgggtatagccttcttcctgtgccaaacgtatctgttcttcaggagaaagttcgggattatctatgaatccggtcactttatgtcctttaaactgctcctttgcatctcttctgatttgtctgtcgatataggtagtatcgagcatggtaaacaaacgaacgtgctcaccgaaaagctcttttgccacactgatattctcattaaaggctatcttgtcatggaagcctgtcacgttgggatgatgtttcagtaatccccaattcggataattgacaccaccaaaaaccacaggcacttctttcgccaactgaattccgcatttcatcaatgaataagtagcctggtcttcattcaccagaatcacttccggccgccagtctctcgatacggaatcaaccagaaagcgcatccgttcgagttccggttcttcccagtaggattcacagtctaaataaacggtacgaatatcagcatcaattttctctttttcaaattgctccgctatcatccggttaaattccggataagccgcataagtctcctcataagagtggataaccagaatacgccgttcttctttttgagaacaactactcacccccaaaaagagcaataaaaatacagggagcaatctaaaaattcctctattcacaccattcatttataataatcgggattaatttttctctgactcgtaatacaaaggtagtttattttcgaacatataagcctaataagtgaaaaaaaagaagctgtctgaacagaaattcaggcagcttctatctatataaagaactattttttcagagtagcatcattaacgctgtcccaattgtgaatctacaaagaaaattccggtatcaccagctttcttgatcttgtcaacaatgccttgtgctgtagcttcttcttctacttgttcgcgaacaaatccccacaagaaatcctgtgttgctttatccttttcagcagcagctacgtctaccagcttgtccaccaattgagaaacatgacattcatgcttgtaaacgtgttcaaacacttcgagaggtgtaccccatccgttaggaacaacatctattttatccactttagcagttcctccacgtttgatgatataatctgccattgcataagcatgtcccatttcttcctgggattgctttttcatccaatgagcaaaaccgctgaaaccttctttctcaaaatagaaagacattgctaaatacaggttagcagaccacatttcagcagtaatctgttcgttaattgcattctgtaatttttctgaaatcataatcgtattttttattaagttgttaatgtagtttctttttgaactcattacaaaaataacaagctttcagttaaaattgttccatgcaccctatatttttaaactacattcacattttgattgtagtggttcattttttacttacaccagttcgtcggaagtatatcctttcggcagttcacgacagttgtatccggaagccattatttcaccataagcaccagcagaacgaagggctatcaagtcaccacgcttcactttgttcaggtcaatcgcttttccgaaaacatccgacgattcacagatcggtcctactacatcgtatgcctccaatggttcttcggaagtaatattttccattttatggaatgcctgatacagagccggacggataagatcggtcatacctgcatccaggatggcaaatttcttccgtgtgccttgttttacatacagaaccttagagattaaggaaccgcactgtcctacaactgcacgtcccaattcaaaatgcaaggtctgataaggacgtaatttcagttgtccggcataggtagcaaagtaatccttgaagttcggaatagcctgacggttgggatgtccgtagtcaattcccaaaccacctcctacattgatatgttctaccagaattctgcgagcttccaatttatcctgcaattcattgacacgattacagagagctacaaaatcgcccatatccagaatctgtgaaccaatgtggaaatgaagcccgataaactttacgtttttcatctcctgcgccacatctatcaccttgtccatatcctgcatgctgataccaaatttattttctgccaaaccggtagtgatatttgcgtgagtatgtgcgcctacatccggattgatacggaaagcaacattagccaccttattttgagcagcagccaattcattgattacttccagttcgggaatagactctacattgaaacagaagatgccgtactccagcccgaggttaatttcccagtctgctttacctactcctgcaaaaacaactttattggccggaaatcctgcacggatagcggcacgaatttctccaccgctcacacagtcggctcccattccgctctcacggatgatggtaagtactttcgggttagcatttgctttaacagcgtaatgcactgaataattaggatatttggcaacctcatggttaatagccgacaatgtatcgcgcagcactttggtatcgtaataatagaaaggtgtctgcaaagtgcggaatttatcgattggaaatattcccttcataattcgaaaaacttgtttagttggttaaaaaagagcgcttttatcagttcggtaaaagcgctcgtattatttgtggaattatttgccgttgaaaagcatatcgctcaacgattgtaaagctactttcttatcacactcccgaatgaggaaggagatgttatagttacttcctccaaacgagatcattcgcaccggtatatcgcgcatcgcatcgagtgcttttgcttcaaaaccgacattttcccattcaaggtcacctacaacgcagatgatacacatttctttatcaacggttactgttccgtatttcttcaggtcgtccagaatctcattaagatgtttcgtgttatctatcgtaacagatacaccgacttctgacgtacagatcatatcgatagatgtctgatagctttcgaagatttcgaacaccttacgcaagaaaccatgagccaataacatgcggctggatttaatcttaatagcagtgatgttatcttttgcagctactgccttaatcttgcctttttccgtatcgttagaaatcagtgtgcccggagcctccggatccattgtgttcaacaagcggacagggatattggcatatttagccggctggatacaagtagggtgcagaatctttgcaccgaagtaagccaactcggctgcttcttcgaagtgcagctggcgtaccggagcggtcttgtcaacaatacgcgggtcgttattgtgcataccgtcgatatctgtccagatctggatttcggaagcgttcactgctgctccgatcagagaagcggtgtagtcgctaccaccacgttgcaggttgtctatctcaccgtaagcattgcggcagatgaaaccttgcgtaatgtagatttccgtatccggataaagatccaattgagcacgcaatttatccttaatatatacggggtccggttctgcgttcttatcagtacgcatgaattccaaagccggaagcaacacggacttcacaccgcattcctgcaggtaaaagtttaccatcgccgtagagataagctctccctgtgccaaaaccactttctcttcgaacaaagtgaaaaggtctttagtataggagcggatgtagtcgaagtgggatttgacaacttcaagacctttctgtttatattcctgggttgcaaaaagctcatcaatatgctgtttatattttgcttccagcttattaataatctcgttggcaccctccggattcttcttatacagatagtccgaaatttccaccaatgtgtttgttgttcctgacatagcagaaagaacaacaatcttctgttcaccatcggtaatcaatttggctagttccttcatgcgctgagcagaacctacggaagttcctccaaactttaaaactttcattttcgttactgttttagttatctatatttaaatctatttctattgttctctgtctgggcatatattcatcagtcacatctacaatctgatggtcggcacaacgatataccctgcccggataatctttcaacagttgcaaattgtgcgtcgtcatcactaccgatgagccggattcgcagatattgtgcaacaattcaacgatggctttacctgtttccacatccagatttccggttggttcatccgccaggatgatagccggagaattgagtacggcacgtgcaatcacaatgcgctgctgttcgccaccggaaagttcgttcggaagtttataacctttgttggacattcccaccagttgaagcacttcttcaatacgatcctgtatctcctgtttgtttttccagcctgtggcacgaagcacaaattccaggttattatatacagtacggtctgtgagcagctgaaaatcctggaatacaatgcctaacctgcggcgcagttgcgggatatgcttacgtttgatagatcgcatattataacccagcacttccgcttcaccgtcaattacgtccagttcgccataaagagtcttaagcagactcgtttttcccgagcctacttttccgatcaaatagacaaactctcctttgtgcaattccagatttacatcacttagcacacagagttcctgttgatggatttctacgttcttatattgtatcaacgccccgtcatccatgccgactcccgttttaatttttaatttctaatctttacttattaatgcttcttccaggtactgctatgtctttcctgcagttcacgtgcaagatcttcgatgcgatagccttttgaagcaagcaatacaatcatgtgataaatgaggtcggctccttcgtagatcaaacgttcgtcagtaccgttcgttgcttcgatcactgtttccacagcttcctcacctactttttgagctatcttattgattcccgactcaaacaggctggttgtataagaaccttcgggcatttcttcgtgacgtttgtctataaagtcctgcaatgctttcaggaacatgaccggttcttcgtttttctccccccaacaagtatctgtgcctgtatgacacacaggacctaccggttctacttgaatcaataatgtatcattgtcgcaatcagcctttatagatacaacatgaaggaagttaccgctttcttcgccttttgtccataaacgattcttcgtacggctaaagaatgtaacttttccggtttccaccgttttatcataagcttctttattcatgaaacccagcatcaagaccttacgtgtctcgttgtcctgtatgatagccggaacgagtccgttcattttatcgaaatccaattccatttttatataagttctaattactattccaatttacaattactacctattcgcctacggaattcttttgcagacagttcctatatttatctgactatataatccatccgcaggaaaacccggccggggtgcctcaccccctgatggtaattccttcgccgcaaagatacgattttaattcgggaattttaatttctccgaagtgaaaaacactggcagccaatgcagcatctgcctttccctgtaaaaagacatcacggaagtgctccttacagcccgcacctcccgaagctatgatgggaataaagagttgatccgctaaagcggcaagtgcttcatttgcataaccggcttttacaccatcgtgattcatgcttgtgaagagtatttctcctgctccgcgttcctgtgcttctttagtccactcgaacagatctttatccgtttcgatgcgtcctccgttcaggtaacatttccaaccgttttcggtctgtttggcatctacagccaacacacaaacttgtgagccgaaattctttgctatctcgtcaaccaaccggggattgcggatagcggaagaattgatagaaatcttatctgcccctgcattcagcagacggtctacatcacttaattcattgattccaccacctacggtaaatgggatattgatattagcagcaatccgttttaccaattccgtaaaagtcttacgtccttcatggcttgcagtaatgtccaggaaaacaagttcatccgctccctgttcactgtaagcacgacctagctccaccggatcaccggcttggcgcaagttgacaaaattcgttcctttcacggtttgtccgtcttttatatccagacaaggtactattctttttgctaacacaatcctattttatttattgttcaacaatttataatctatattcctgaagctcgattcttatcttccttataataaaggtatcttatttattccgatacgctcattatagaaagattctcaaatcttgtaaggtgatatgtccttcgtataatgccttaccgaaaataactccgggaacaccggcctcatccaaggcaacaatatcatccatcttgctcaccccgccactagccatcagataaaggtcagggaattttgccagcatctctttatacaaatcgatagaaggaccactcaacattccgtcacagctaatatccgtacagattacttttcgtatacctttatctatataattttcgagaaatggaaaaagttcacaggcactttcatctttccaaccattgacggctatcttatgttcttttacatctgcccccaaaataatcttctcactgccgtatatttccagccaatgacagaataattccggatctttcactgcaatgcttcctccggttaccatctgcgcaccgctctcaaaagcaattttcaaatcttcatcactctttactcctccaccaaaatctatgacaagagaagtgcgtacagcaatctgttccaacacccgatagttaacgacatgatgagaagcagcaccgtccaagtctaccacatgaagcctgcgaacaccgttcgcttcaaactcctttgcaacttccaccgggttctcattatacacctttttactatcgtaatctccctgggaaaggcgtacgcactttccatcaataatatcaatggctggaataatttctatcatctatttactatttgtatcttagaggtttaaaaagtttgtcagaatcttctctcctgtcttaccacttttttccggatggaactgggtagcataaaagttatctttatggagcgcagcactgaacgggtgaatatagtcagttgtagcagcagtaaagtcgcaggtcggcacatagaagctatgcacaaaatagacaaactcttcttcggtgaacccttcaaacaatttgctattcgtttttccaatggtgttccatcccatgtgcggcactttatcctcatgtttctgcgggacaaaacgtttcacatccacatcaaagatattcaaacaatcgacttctccttcttcggaatgccggcacatcaactgcatgccgagacaaattccaaatacaggctgacggagattcttaatcagttcgtccagtcccgttgccttcaagtggttcatggtagtttccgcctctcccactccgggaaaaataactttatcgaccgattggagttcttctttatcagcagtaatcaccgcttctacccccaaccgctttaaagcataatccacagaacgaatattgccggcattgtattttacaactgctactttcatcagctaaatattactgttttatttttataagccaaaactttgcgctcgatgtgcttctgcactgcacgcgaaagaacgattttttccaaatcctttcctttatttacgaggtcttcaatagcatctttatgagtaatgcgcactacatcctgttcaataatcggtccggcatccagctctgtcgttacataatgactagttgcaccaataattttcacccctctctggaaagctgcgtgataaggcttcgcccctacaaacgcaggaaggaaagaatgatgaatattgataatcttattcggataagcattaatcatctgttcggagatcacctgcatatagcgtgccaatacaataaatgtaatcttatgtttggcaagcaattccatctctttgcgctcctgttcttctttcgtctccttggtgatagggaacagatagaaaggaattccgaaacgttctgctacgtgctgcaaatccggatgattacttattataagaggtatctctacattccactctcctgccgtataccgggctaacatatcgaaaagacagtgtgacagcttggatacgaaaatagccatacgtggttttacatcagagaaataaagacgaaaatccatttcatatttttgcccgtagagtgttctgaaataatcttcaattttttcctgtggaaccagaaaatctttcagttcccattcaatacgcatgaagaagatgttctctacatgatctacatactgatccagatagataatatttcctttgtttaccgtaataaagtctgtcacttccgctaggattcccggtttgtcgggacagtgcaataacagtttggctgttgtcatcattctttctactaattaacgattctaggcagattattttctacctttctaattttagtccgcaaaaataacgatttattgcaaaattacgaattattcaagcagaaagttgatataaaaacggtgatttcttacagatagaaagatatcgagagttattttcaatgaaaagaatgacaaactttaggatagtgatgccattgccttcggatagtgacggtattccatcgtgatagcgtcactataacgatcagataccgtcactatccgaagagaagaaaaacgaatattttttttcattacaaaagtactcaaaatgagacactaagcatttttcttgttttttcttgaaaaaaacttttctcaaaacgcttgcaggtttacaaaaaacaactacctttgcacccgcaatcgagagagatgcagattaataaattgaaattctggtgcgttagttcagttggttagaatacatgcctgtcacgcatggggtcacgggttcgagtcccgtacgcaccgcttctttcactaagaagcagagagaaatataaatgagttaatccaattaaaatttggtgcgttagttcagttggttagaatacatgcctgtcacgcatggggtcacgggttcgagtcccgtacgcaccgcgaaagcaaatagtaaattaaagcaaagctctgaaattcaagaaattcagagcttttttctttttcttcacttcatttaaaacagagtttaagtaggcgatagatgtgcccattcaaactctacaatgattttttaaccaatcattttattcaaatgtaacattacatcttcaattaaaggtacctatactaagcatctgtttataattgaacagagactacaactgcatgtgtaaaataggatattccttaccttctccgtccaaattcgaccttttatatatgttaaaacccatatattcataaaaaccgacagcttgaacattttgctcattcacatcaactttagttacttgtaaattatctatggcataagttattaatttttttccgattcctgcgcctcgatacttattgtcaataaataacatttcaagatttccttctgcaattcccataaatccgattaagattccctcttgttcaaatccgaatagattaacatactgaaaatataccggaagtcgttccttataatatagaaaatcttcctctttaagaaaatcatgtgtactcaatactgcactttcccaaatttccatcaaacgtggataatccgtaactttaatttttctaatcatacttgtaattgcaatttaaagtcgcaaagttcgttacttatacattcaaaacactgaacccaagttaaaaaatacgtttacggattctgcttagtgcttgcggtgtgatacccaaataagaagctatatcttttaatggtatatagtttaatgtaataccatattcttccatcatctgtagataatactgttcaggagaatatttaatcaagtcgatatttcttttcaaaagtttattcaacaatatagcatttaaatcttcaaatacagtttttactttagggatagcggtatatagttcatttacttgcttcttgtctattcggtaaataacactatctacaattgtttgcacattaaatgcagacctagtttgtaatgtaaaagatatgtttgacattgaaaacgtaccctctttacaaaaccagaaagtttgttcttccccgttatgatttaaaagccaacaacgtaatattccatcaaaaacgaaataactatacctctctgtttctccttccttaatcaaaaatgtacctttactaactaatattcgttcaaaatattggtcgaataacttaaactcctcccaattaaaaattttagtactaaaattaaattctttaagtagtttttctaaaagcataatctaaatatgattcgtaatatacttactcatttaatatattcactattacttccgccctatttaacttctcatatttagtgaatatattttcagtagccatctttatattactcctttcgcccactctccggcctgcttgacacttccgttcaacaatcggctttctccccatacgatttttggataaagtttcttgagttgttttacactattagttattgagcttcctccggaagtagcaaatggaataacggttttaccggagaaatcatatttctcaaggaatgtattgaccggacgcggacataaattccaccatatcgggtaaccaaggaatatcacgtcgtaatctttcagattaagcgcttctccccccaattccggacgtgaattttcagtcgtcatttcaattgaactacggctactcttgttgttccagtcgagatctgccgaggtataggctgtagcgggagttatctgataaagtttgccgccaaccgtttttgcaatggcatcggcggctttttctgtagttccagtacaagagaaataggcaaccaggattttcttatcggactgtacattagtatccgctgtctgattctgcgcttttgatgagcagctaaagcaaaggagactcataaatatgaatataatctgtttcattttattttgattttaaatatttcttatcattaattagtttagacattatcacgatggagtaaccccacaggcgttttcattcttccattactttgataattgctcatatcgtctatcaaacgatgtatttcttctgtattaagcgctttgcgcgtctttacatattccttaaaattcctcggtagtcatattatttcctttcaaaagataaagcaggattagcaaaaatcatcgtttagtctgttcgagtttgttatactcgtcatctgtgaccggctcaagccactcattggaagtgttttcgccggaaacttcgaaagccagatgagcaaaccaactgtcggcagcagctccgtgccagtgtttcacattggcagaaatatggataaccgtaccaggcaaaatctctaccgccggtttaccttcttcctgataccagcctcgaccggctacaccgataagcatctgtccgccacctttcgttgcacggtgaatatgccagttattgcggcaacgtggttcaaaagtaacgttagagatattcacctgctcgcgcgaaaccgaagcaagataactgttaccaataaaatactgtgcataggctgtattgggttcgccaatagggaaaatcatctcacgctggaaagctgttttggcatcctcaccaacaatatcttcagaccatactccttttgccaaattgaacgctgcccacgctttcggccaacctgcatagaaacctatatgagtgataatctctgcgatctccgtgcgggtgatgccgttcttcttcgccgactgaagatgataaacgagcgaattgtccgtgattcccatactgataagggaggtaatggttactaaactgcggtcacgcagaccgagtttgtcagtgcggctccaaacttctccaaagagaacatcgtcattaagttccgcaaacttaggggcaaacgttcctaactggtctcgtcctgccgtctgtactatcttttcttgtgccataacattgagtgttaaaatactaaatactgaaaataaaaggagtttattcataatcatttcgtttattgaatgaagttattaatgcaatttgcggggttaagcggcatttggtcagagagtacgagagtcttaaccatgtgcagcgttccttgcttgtacttttgaaaatgctccgatgcaatatgagatttataagcctcctgactcgcgtaagtttcaagaatagttatcctgccaggattctctttttcgctgacggcatacatagtcagcactcccggttcagtacgcaaggagacttcacccacttcggtcgcatatttcatatattcttcaagatactccggataaacctcgatttttgatagccgcacaataccgtcagccgccataggtaatttggcgcacataccaggctgctgttttatatcctttttccctgtcatactgcatgataacataacgaataaagacaaaacacttagaattgtttttatcaccatcttctatcttttcattgttaaacttctgattgcaaatttactgcgataaaacgaatggaattgtatatcaattacggatttttgtacccaaatccccgattctgcaataaagaaccgtacataattcgaatgaaatgaattatattgccaataaaagaattaaatatactacgatttagaacgtaatcataaatgatgaccccaaagtaagcatattcatatactcaccactgtttctgctatgtgacggaagcaagttataatcgagaaaaaaacggattccataatattcctttgctttgaacgtcaaggaaaccccacttcccatgcagaaaccacttcttgaagaaaccgaccggtcagttaattccaattgtggataatgcacgtatccacccagaagtttactgcctatcagccatcgtgaagacaacggatatgaaaaatagcttcctccgcaaagcgatatcgcatcaaaggtgttattctctgcccgttcttcattgacaataatcaaagtattggaaactgtgaatcgtcctccaacgcctacatacggattaaaaaaataggccccctccacaccggccgaactgcctgatgaagtacggaactccatttcttcgtcgatatcataaccgctcaacggaatattcaacccgagatacaaactgacaaatgaaggcttgtccatcctgtcgaacatattttcattcgcaaacctattgatccctttttccctgaatatcagatcagcaaagtaataccccacttccgttgacaatattccgattcctgcacccgtcaatacatcacttaaccaatgcttgttgtttgccatccgcataagaccggttgcagtagccacactatatgctccgacacctacccacggacttttatgtccgtattccttagtaaacatggtagcagtcataaatgccgtagccgtatgtccggatggaaaagagtgtttgtttgaaccatccggacgctcgacattcgtcgtttgcttcaaagtatttaccacacacccatcagcagtgcagaaaaagcgtcggaaacgagcattctaccccatgaactgcgactttgtactccagctactttcataccaagcatcaccgcagcaggggcatattgcatataatcatccaaatgacgattgaaacggggcagatattcgttacgtaaacctcgaaaatggtcgtcctccctttttacaatcaagccaccaacaattaacggaacgccgatatacgtcatctgatagaaacgggaagatgagaatttatcaagccttctactaaaattggttgttgtagagatacgcaaactatcccctctttctgccattacattatctgccgaattttgagccgataagaaagaaaagctacaaatgccaacaatgcatattacaatccttttcatgctatcgtaatttcttttgaattaggatacaaagataacaggcaactttgtagaaagtttgaagatttacaaaaatatgactataaattctatagttatgagttacattacaacttttacggggaagcatttcgaccccatccatcctgttcctgaaaaaattgatatgaaagacatcgctcatgccttgtctttgatctgtcgtgcaaacggtcatacccgtttcttttattctgttgcccaacattctatcgcgtgctgcaaagaggctaaaacacgaggactttccaaccatatacagttgggatgtttgttgcatgacagctgtgaaacttatatgtcaaatgtgacacgtccgataaaagccaaacttacagaatatctcaaattcgaagatcacctgcaaaatatgatttggaatcattttattagcgaacccctctcggatacagaaaactaaatggcacgcggactttatttttaaaaccgataagatacttttctcatcagactcttgacaaaggactttttatgttgtatctttgagaaaagaaaaagtataagcaacatgaaaatagtaagaaataatcatacataaatcataaataacctgatattttacaataccactcctatacgatatggggcaatagtcgaatgattattgccccattttgtttataattcagcttaaaatctctcgtctgattctaaaactgttctacaatagtttataataaactcgaataccgttttactaaaactatcaaaaagtttattataaacagaatccgggtttattaaaagccacgtttccttttgtcaaaaatagagtaaacaagatttctaggattcaccataaaagatctgctacaaccttacaagtaatataagcatacaatcattcatttacttctttatttacacaatcgttttcctccctcacattccatctttcttttttcccaattcgttaattaaacccaaaacttcaattacgatttgccgtatctaccatatttttacatacatttgcgtctgacataggtgtcaaacacgaggtctaatttaagatgtttggtatatgaatgcatataaagtgggtttagatataggctctactaccactaagatggtagtattggataaagatggaactacagtcttgttttccggatacaaaaggcatcaggcaaaaatacaagaatgtttactcggatttctttatcaaataaaggaacagttgggtgatattcctttatctttccacattacgggctctgttggaatgggaatttcagagaaatgctctctgccgtttgtgcaagaggttgtagctgcaacaaactatgtgcgccgggagcatccgcacacagccactatgatcgatattggaggagaagatgcgaaagttgttttctttcaggacggacaggctacagacctgcgcatgaatggaaattgcgccggcggaaccggggctttcattgaccagatggctattctgcttggagtctccatcgacgaattgaatgaactagcacttcgttccaatcaggtatactctatcgcttcacgctgcggagtattctgcaaaacggacatacagaatctgatggccaaaaatatatctaaagaaaatatagcagcttccattttccatgcagtagccgtacagaccactgtcacacttgcacgcggttgcaatatcgtagctccggtattactctgcggtggcccattgacttttattccggcccttcggaaagcatttgccaactatctgaatctgtcacaagatacagatttcatattaccggaaaaaggaaatctgatccctgcctggggagcagcattggcagagaacaatgaagaaagtattcatctctccaacctgatacaggtaatagaaaacaaactaagtgttacctcacctttccagagtgatctttctcctatattcgacagtgaggaagaatatcggtcatggaaaaaagaaaaagaccagtataaaattcaatatgccagtctgcgtcccggattacaggaagcaactatcggcatagactccggctctactaccaccaaaatcgtagtactcgacaacaatcatcgtatcctttactcctattatcacgacaacaacggaaaccctataaaaacagtagagaacggcttgcagaaactatatgaagaatgccggagacgaggaactaccctgcgcataaaaggaggatgttctaccggttacggagaagatctgataaaagcggctttccacatggatgcgggaatcattgaaaccatcgctcattatgctgctgccaaacatatcagcaaagaagtttcttttatcctggatattggaggacaggatatgaaagccatctttgtgaacgacggagtaatcaacagaatcgaaatcaatgaagcctgttcctccggttgcggttcttttatcagcacatttgcgcaatcgctggattacagtgtggaggactttgccaaagcagcttgtttttcgcaagcaccatgtgatctgggtacacgttgcacagtcttcatgaactccaaagtaaaacaggtacttcgggaaggagcgtccgtagcggatatagctgccggattatcttattccgttgttaaaaactgcctgtataaggttctgcaattaaaagacacggagatacttggcgaccatattgtcgtgcagggaggaaccatgcgtaatgattccatcgtacgaagtctggaaaagctgaccgggaaacaaaccttccgcagtaactgtcctgaattgatgggtgctcttggttgtgccctatatgccaaacaaatcgaaaatgcccgggtgacggagctgaacgagatgctccaatgggcacaatatacttccaagcaacttcaatgccgggggtgcgagaaccagtgcgccattatgcgatatacgttcaacagtgaaaaccattacttctccggcaaccggtgtgagaaggtgttttccaataaaggaagccatgcggacaaaggcatcaatacgtatgataaaaagctggaattattattcgaccggagcgcagatattccacaacccctattcaccataggtattccacgtattctgaacatgtatgaggaataccctttctggcataccttatttactgcttgtggcattcaggtacagttgtcggaaccctctacattcagcaaatacgagactgctgccggcatggtgatgtctgataacatctgcttccctgccaaacttgtgcacagtcatatccgtaacctgacactgcaaaacgtcaaccggatatttatgccgttcgttgttttcgagaaaaaggataagcaacagcaaaacagctataattgccccatcgtttccggttattcggaagtcatcaaaagtgtacaggaagagaatataccgatagatgctccgactatcaccttcaaagatgaagcattgctgtataaacaatgctatgaatatctgaaatctttgggtatcagggatgaggtatacaaaaatgccttctcacgcgcattacaggaacaatatgctttcgaagaaaaaattgctgcctataatcaggaagttctgaacgagggacgggaaaaacacaaactgattatcttactcgccggacgcccttaccatagcgatccactgatacagcacaaggtttcggacatgattgctgcgatgggagtttatgtgataactgatgatattgtccgccagcaggagatttcattggaaaagactcattacctctctcaatgggcatttaccaaccgtattctgaaagcaaccaagtgggcggcaatgcaagagggtgacatacaatatatgcagatgatttcttttggctgcggtccggatgctttccttatagatgaagtacgtaacttactgaagcgatacagcaagaatcttactttgctcaagatagacgatgttaataatatcggctccatcaaattacgagtccgctcgttggtggaaagcttgaatttcagtttgaaacattctcaaacgaaagatcccgagccatttgtttcaactgctcctttcaccaagaaagacaaaaagaagaaaatcctcgctccattttttacgcctttcatctcaccactcattccgtccatcatgaaagtggccggatatgaaatggagactttaccgttgagcgacaccgcatcatgcgactggggattgaaatactccaataatgaagtatgttatccggcaacattgattgtcggcgacatagtaaaagcctttaaaagcggacgttatgatcctgccaatacgtgcgttgccatcacgcaaaccggtggacaatgtcgtgccagcaactatatttcactgataaaaaaggcattgattgagaatggatacaccaatacaccggtggtatcacttgctttcggcagtggtatcgaaaatgagcaatccggttttaaggtaaactggctcaaggttttaccaatcatacttgcgtctgtgttatacagtgattgcattgccaaattctattatgcagctgtcgttcgtgagaaagaacgggaacaggccgcccgtctgcgcgatctttatctggatacagcacagcccatcatccagaaaaataaaccggaggacttgttgagctacttatatctcgctgccagagacttcaacaaaatctgtgaacagagatcctgtcacaaagtaggtattgttggggaaatattcctgaagttcaacccttttgctcaaaaggacgtcacctcatggctcatcaaccagaagatcgaagtgattccgccactgataagtgatttcttcatgcagggatttgtcaacctgaaagtgagacagaaccaacacttgcagcgaaaactcactcccgactttgttatcgactggttatacaagaaagtccagaagcagattaataaagtgaatgaaatcggcaaaagtttcaattacttcataccgttcgaatctatctttgaaaaggcagaaaaagctaaacaagtcatctccttgggcacccagtttggagagggttggctgatatccggtgaaatactatcctttgcttcccaaggagtcaatcatgtcattagcttgcaacctttcggatgcattgccaatcacattgtagaaaaaggaatagaaaaacgtataaaatcgctgtgccctcaaatgaatatactatctttagactttgacagtagcgtcagcgatgtgaacataacaaacagattattactttttattgacaacataaacaactaaaattatggctacaacggaacatagcgatttagagcagcaaataataaaaactgcccaacaactttttatagaaaaaggatttgtggagaccagcatgagtgatattgctgcaacggtaggaatcaaccggcccactttacattattatttcagaaccaaagataagatgttcaaagccgtgttcggctcgatagtcatgtctttaatgccgaaaatacaggatatagtaaaacaggatatcccatttatggagcgactaagcatgattctggatgagtatattgagcttttcacaagtaatccctgtcttcccagattcatttgcggagaaatacagcgtgatgtaaaccacttgcttgccactgcaaaagaacttcagttcggagatgctttatcccaagtgaaagacagtatactgacagcaatggaagacggtaaacttaaaaaggttccgatacatattgtatttctgactgtctacagcctattgagctatccatttcttgccaagaacctgatagtatctttattcttggaagatgaagccgcttttgctgacttcctgcaagaatggaaacaaaacatcatcaaccaattgcagaacttattgtgttatgagaaatagtatagacactataaacaaaaagagactgaatattcagtctctttttgtttattaccattccaatcaccccatcttgcaccttattcgaccacaaaatcttccgatttaaaattactatagaaacgtcctgaaatagcagtaaacttcaatacacagtaatcgggatccgtcactccctccggataatacatggtatctccctcctgccagatcatctctttactggcactatccgtcaagacgtccatcataccgcgtagcatgacccctctaaagaatctcgtatcgcagaagtagatacatgcatggttgttctcccggtattgcgccacacgcatggacgaagtatttgttgtcagataaatcgtttttatcccctctctttttctgggttgcagcattgctttgatggtaggaaatccttcaccgtctatcgaaccgataaaagctgttttcagcttatcaatcatgttgcctactgttttttccgcgtctctcatcattttactttttattattggtttattatctgatgcgaaagtagagaaatgccaggaaagcaatgcaataaaaagaaaggtagaaatagcactttttacggtttgtgtgctttacgatacaataacggagtttttcccgtatgctgtcggaagctacggataaaataagaaaccgttgaaaaacagagttcaaatgcaatatcagctataggaaagtccgtataaacaagcagcctcttggcctcttccatcaccttgccctgaatatattgttttgcgctgaaccccatggtcgaggttatcatctcattgagatagttaggagtaatgcagagcttatccgcataatattgaaccgaatgttgctcttttgcatgtgtcgcaaccaaattcatgaatttacttacatgattattgaaaacttccctacttctgccctcctccatcgaaatcattttaagataagcacgatccagcaacatcaggacttcataaagcaatgctctcaaaacgtgtacatcgccctgttgatacgaatcaatctccatctttatatcatgcaaggtttcaagtatgcgtgtataaagctcatcagacaaatgtagtagcgatgaagaactttctatctgaaaaaacgaaagatgctgtacaaacaaagaatctttaaagaggaaagacaaaaactcttcttcgaaaatcagagcatacccattgatgatatgatgaatatcccagttccggatttcccccggtttagaaaaaaggacgtcacatggaattgcttcataggtttggttatcgactgcaaaagctcccttaccttctgttataaaagtaatatcataataatttagagtgtggacagtacttttagtcaggaacttcttcacatacttcagttctactacatcgaccaaaagttcactcccatacttatgcttataaaaagtatatcgaggtattgagtttttcattcagaatacaaaaatagtattccttaccaaataatccaaagacttttcaaattcgattcgattgaataagccatgaaccatctgataaggaatacatagaaaaatatgtctaggttatatttcctatttagaacttccggccagatatcccaaactggtcacatctgcccccaagtaatgattaatgtgcttcaatggcaccctgtacagaatatctggaatttccgccaataaagagaggtacctttcccttactgtcagcttgcgggcattcatatcctcttcctctttaaagtaaaactgatactccatcagttgacggaccagattcgcaaatgaaattgaagatgcacacaactcttcaatctcctcttcactgatgtaataagcagcacatttcgtcagtgtcttgatagaatactgacttgaattatagcataacacagcatcacccgcagagaaaaaccgattggttctctcttctccttcatgagtggtatatgtatgcaaaataccggaaacaataatgtacaagctctgctctggcaatgtggcagaagcaatcgtttctcctttatccagatacaccatttccattcgagccaacagctctttcacttctctttcatccacctgatactcaaaacagagtttcttcaaataagcttccatacaaaatagattttagttaatatatgtcacttaaaaacacctaattcgacatagcaggcatcattgtgccactcaaatataatttcctttgggtatatcgtaaataccagatacagatcaataatgaaacgaccgttgaaatgggtggagcaaatcccatgataaacagcgacgagctatctatctggctgaaccagtatgacaacggtatacggaacaggaaagtggctatcagactgtgaatcatcgggaataacgagtttccttgtccgctgaaataagaattaatgcagaacacgaaactaaccacgatgcagtcgatgctataccctcgcaaataatctgccgccattgccaccacagcagcatctttcgtaaagaaagcagtaagagtctccggcaggaattgcgaatacacgcaaaccgacacaccgaaaacaagagcaatcccaatccccgaagccagacatttattcattctcttgataagtcccgctccatagttctgtgcagtcatggttgccacagccgatgatatagccatcggaggcagcatagcaaacacaatgattttctcaacaacacccagggaagcagatgcaatgactcccatctgattgacaatgacagtgataatcagaaaagaaacattgattaaagcatcctgcaaagcaataggtgctcccaacaccaagatctttttagacagattccggttcaatcgaatatctttccgtgaaaagtcaaaatggaatccgtgccggtataagaaccagagcgctattccaaagctgactccttgtgcagttacagtagcgatagccgctcccgtagccccccaatggaaataaccgaccaatataaaatcgagcactatatttatcacacatgccagcccaacaaaataaagtggtgttttagaatcacccaatccacgcaaaataccacatacaacattatatcctactataaacagaatacccagagagcataccaaaatatagtttttcgtatctaccatcgcttcgacaggagtatgcatcagttctgctatccgactatgaaaaagcaccatgaccaaagttagcactacgccggttattgaaaacaaccatacggaagacccgatagtaaaagctactttccgattgtctttagctccgatagcaatagcaatcagcactgttgtcccggtagtaatacccagaataatacctgtaattgtctgcatcacctgactaccaatagctacggctgccacacttgccgaatcatcatattgtccgacaacgaaaaggtcagctccgccataaagtgcctggagcacattggcaatcagaaaaggtactgcaaactgcaacaataccttcggtacgcttccttgtgtcaaatctaactctttcatagtttcttcgatacttttcctctttatcttattttgttacaacataaaaaaagtgccggacaagcgaatgatttgcaccattcatcttatccagcactataattattattatagcaccctccgatgaggatttttatgcctgtccctatttcagggctgcaaatatgggctttgttttcataattaccaaattttaaccggcttttattttcttatgaagatgtaactagctatatatcaactattatcagacgaggtttggtctataggatctccgttagaaaaacgaaagaaagctgccaaccgatccggattcagcgtataacgtgcgcgttcttttaataagggttccgcattcattacggcacaagaatgagaaaccacggacatcatcggccagtcctttaacgaatttcctacaactaaagtgtgttcagaagctaaacccaaagccttacataactgaagcaccccctcttttttactcgcttcaggatgaatgactgttatcagcggagctttatgaaagacctggcagggattttctttcaaccgggtaagaatagattctctctgttctttatcacgtaccaatatactatacttgtaaaccactccttcataactatgaatagtaacttttgacgattctccatatacctccggatatactttcaccggcaaacacttaatctgccgcgaataagataataaacctccatctgcaaacactcctcccctgaataaatcgaaaagagcctttcccagctttttcttcgcctgctccatcgacagagaagtggcaagatataaggaaacggactgtgccatatatcgcaaagcgttagcataactttctggaacttttccctgtgaatcagccagtgttccatccacatcgaagaaaacagtcgtaataagtggcttgtccggtattcgccagaatgccccttctcccattattcgatgtaaagggtgattgttcaggttactaaatgcaatataacagtcacaaaccttcctcttgcaagataacggcacaacagctccatcaccttgataaaaattacctatcttcacccggcttcggggacaagcatacatatcccctttccaatcgataaaacaattatcccttcctcctgcgcaaacttcccattgtgccggagcattcttcaagtcatactcaaaaagattatccagttgactgaaaaactgaatatcttcctgacttaatggtgcctttaacccttgcatagcattaatgaataaataaatatccggcaaaagagcattccgtaaatcattgagtacggcctttgcagagggacttcctaccgctccggcacatacctgtattcccgcatgatggagtatatgaatctgatgcgcaaatttctctaccgaagtcatctcaggatgaaaactagcccaaagccttatcttacttatcacagtgggagccacacgaatctcatcaagccagtgtttagccggaaaagaaaggttagtctgacaggaaattccggccacctgtggcaatgccgccaaatgcaccattcctttccgataataacgatggatcaatacttcaccgtaaggaataataaataactgcaacggctcccctttccattgttcaatagctgctataaaacgattccatatctgttcatcctgtgtcgtatctgccagatgcgacttcttgccgaaagggcaataagaacaggtatagttgcagctattcaatttgccgcgataatatatatgcctgaaggaaagtaaagagctttcgttttccatttctatttcgttcaataagaataagtttccatcagttctcttatttcaggagtaatgaacaactgaccaatataatcggagtatgccattccgtcggaagtcagacaaacacgaccgttatccgtattttctatccattgccgttcagctaactgtcggaacaacatcacattatccggtgattctccaaagcgacgcttatattcggccttatcaagccccatataatacatcagatttttaatgatgaaacgttgtcgccgttcttcctgagaaagaataaatccattacgagccactgtaaaatcagtagtgcccatataatcatctatctctccggcaatacaacgctggcaaacagtataccgggtggcataatgcaaattacccaggtaactgcgtccgccggagccacacgacagcatcacttcatccccacatgagatttccgcatcagtagacggatgatgaataaaacgtcgcatcgaagtttgtagaaagcctctgtctttcaacaaatcacaagcggcacaatacatctgaaaacagacatcatcggattcccgctctgtgatagccgttcccggtcgcacatatagcggatagataaagagttcgttaggctgaaacagaagagcctgttccaatgaataaagaaagctggccacagtttgtcttctgattccgtaaatcaaatcaatattaaaaaacgggaattgtctcttccgaatagcctccagcgcctgattaatcatgtctcgccggggacgtcttttcaaagcagttaaatcttcgtcaaggaaactctgtacgccaatactcacacgagccactcctgcttgcttcaataagtccaaacgggcaggatcggcatattccggcgatgtttctacggaagtaaaggtatgtgaaggatgcactccgaataaggcagctgtatccagtaagtattccagttgaggaacagtgaggagcaacggtgtgcctcctccaatggcgaaactatcaaatgccagtccggtagtgagtggagacaactgttgcgcctgcttgtgaagagtttccaaataagttgcgatataatccgcacgatttgtttgcagagaaaacaggttgcaatatccacatttatgactacaaaaaggaatatggaaataaagcgatgctttctgtccttccacctgtttcaggtaaggaaccagcgaaaccggggacggaaaagaacgataagcagttttatgtggataactatacatatagtctacatatcgtggtagcggttgattcattttttcgttaaaataaagtgtttgtaagggactgtataaaccgtttcgtgagatatgcaatgatattcatatccatcctctccatagcaagtgccatgatcggaaagagcaatcaccagcgtatttccccgcttctgaaaggcctgaaataaacggggtagctgactgtcgacatattgcagcgcggcagcgtgtgattccttatcatccttcattttgccttccacataatgacagttcggataatgaatagcagaaaaattgatatacataaaaatccgtttgtcctccggatagttttcgagtttcttcaatgcaaaatcaatttgtttttcagtactatcgggtgccgtgcatccaaaggtcggcagccaataacttttagtaaagtaaccgggaaacacacgccccagttcattacgcttgctgaagaagttcacccctcctatacaaatcgtttcataacctacattggcaaggctttgcacaaaagttgcttccgtaaacggataacttcccgcaggcggaatacgtcccgtaccagcttgcacagggaaaaacaaccacttacggctgcgtagcgaatgaggttccgccggagaaggcagaaatcctgcaaagatggcaaaatgagacgggtaagtaaaatttcccggcgcatgtcttttttcccattctcctccgtgactgttcagtaccggtgttcttcctgcctcttcttcctccttgctgacatcataacgcaaggtatcaaagcaaagcatcaatatatcatgagtacccaccacctgattcatatccagatccggattttgggtctgttcgccagccggcagttcatctatttgcatggttatatctcttttttatgttttttatctgttgaatataaatagaattatgagcaaacatatcctgatacacatgatctccctgtccgttgacttctattatataaggaatatctgttcctctctctatcagtacatccactccggcatactgcaaatccaaagattgaaccgcttcctgacactgaaaatagatttgttgccgcactacttccggcaaagacaattcgttccaccaatgtgccttattgttcagatgcagattggttatgcttcctttactgcatctcacaacgatataatcaatttcagattcccggcacactacccggagatcataattctctccctgcaactgctctttaggaatccattcttctaaaatagcttctgtttgcatcaccgcttccgccaacgggatcatctctttttccgtactcaaacggtggatacgtttggtgttatgaatgactccatccacttgttgcaaggtagtatagactacccatttattccggttgggttgatagcgaacagccataacgcctcccgcccccgaaccgtaacggggttttaaaaagcatcctctcccgcaaccggtaagaagctctctcaactcatcaaaagaacggggagaaggtaacatcggagtcactttcaaccctctgtccatcaacacttgtttagtttcctttttatcaagagcacgtaataaagcatggggagtattcaaaaagcacacgtcatcagataacctcatctcgcctaaacgttgcagtgtctccttatatgcctgattcaacagcgcatatttcaggaaattcgtttcatcgcttacacaaggttccagtttgataactgcctgccgtagttgcggcaagcagttaaaaagttccccgtaagtcataaaacgaacttccacctgcaagtgtttgcctgcttcaataaagtattctatacgtttggacagagagttgctgacaacgattatctgcatctcctattctgtaatcatcgggtaataccacaattcaccatcatattcatctgcctcttcagtttcagcaatatctattttcatagggagactctgcaactgtttcttcatctccttgctcaaataattatagcgcatattgataaacttcaaatgagcgatcttatccatattatccagcaataattgggcaccttcatctttgagagtaccagccgaaacatccattgtttcaagttggggaagaatatctgactccaggaacatttctacaatcttgtcctgttcttcagagttgacgatccccagataagtcagcttcgggaaacgttctttggagaacaacggacggaatatctcaatatcagcttcaaatccataatcttccacaccaacatatagaatcagtttttccagattggggaaatcagaaccaaaaatatcttctaccacttcggtaggcaggccaccactgataatttcgagtgaccgcaactccggccgtgaagtctttcccaaacgcagattattggttcctttgattttcagatctttcaatttaggcatggcatcgagcagcggactaatatcagcttgttcaatccatgaaatctcctgttcttcctgctcaatatctccccagaacaagccttctatttgtgcgaacttctccttattttcaatcattccctgtaataaggcagaacagtcgccaccctcataatcccaacaaccgattgttatttgtttatattcagagagatgtttatctttcaatatcttatccagaagattcacattgttttcatactcatcataactcaaagtatatttcttggcttccactttcatttcacgtgcagtttcttcagcagtttctacatacccttttttggtcttttccgcaatcagtttgctggctgctttttcagcttcttcagtcgttgcgtagtttttcacttgtgtttgtccgtcggtccccaacttaccataatttacagtaatatctgttccgactacctctatgctccagaatttctgcgatttaaaatcttgaaaaacgaatactctcttcataatacagtttttaatggttgatatttgcacactcaacacagaacgcgcatgaacaatacctgcaaaaataaccattttatgtaatgtacaaagaaatctgtttactaaactttcagagtattcaaaaatacaacccaagatatgcaacaaaggctgccttttggggcagccttcattattctatttctgtaatatatcagtttaatcttcaatagtacatatacttacacggttccaatccggttcagtaaacatatcgcctacaccctgaccttcagcagtgatacgagatgcactgattttatacttgttgaccaagatcgtttttacagcttctgcacgtgctgcggcaattctggcattcacttcaacactaccttccggagaagcgtatcccttaataaccactttagaatcagcatatttcttcaggtaagaagctacacgttccacattaggaagttgtgaagcgtcaactgacgatttaccttgtctgaaagtaatgatagattcgggtacacgggcggttttcactacagtctccaccggaaccacttttgtgcggcatgcttcaagttcttcctgcaatccgttgatacgttggtttgcattgctgatctcaccatctttgttgtttacatctgcacgaagtgcattgattgaagagttcagtccgtcaatttcggcttgattatatactctcactttggcaaaatgatgtgttccgttacttgtcttaaagtgatatgtcaatccggctgtcaactcaaaacctgcgttattagcattgaaacggctctttgtttcagggtaagtaccttgcatatcatacacaatggcaggtttgattcctaatgtccatgctttactttcacccaagttgaaattgaaattcaatcccaaacgcgtagaccaggagttctgatcgccatcgccattcacataataatgtaaccaacccattccggccacagcttccacttcaaacaaacgaggttcgcccgtgtaacttgcaaatagattcatcaaattgactttacccaatacgctgacatccgaagcatcgaaagccgttttactggatgtggtattgatatatcccattccttggaatcccaaaccgaagataggagttaattgctttgagactcccactccaaaagtgggacgcatacctttaaagaaagcactgtgagtaaggggagtaactccaccggcatttactccgacagaccaattatctgtaagtttggtaccttctacaactgattgggcatttgctactgtaaagccacccaatataaaagctaataaaataatagattttctcatattcataagttttaaatgtaatgttttatctgctaaatcattagaaatgtattgtttgttcatgtctaactttctagttcattttttaattcgttattcactttaaacaacatatcatatcaaaaattagttcgcaagccatgagccctattaacatctattatgctttcgaaaaatctaaaatatggaaacatcaatgcaaacgcctcattccctgaagagaaagggatcccaacatcgctaaccattatgcatcttgtttcattattctacactttcattcatccatcaggcaggaaatacataaaccggactctactaaaatgcgaagaatagaacataaacggaaagttatcaggttgttaatgccatatatcgttctgataaagagcgaatatttttcttccttttcaattggaatcttgatttaatttctaactttgccgccaacatcggtttccggaatggcattatcaccagacggaattaaaagggaatccagtgaaaatccggaactatccccgtagctgtaagttttatctctctcataaaaaagagaaatgttatggcattcatttgccactgattcatgaaacggatcgggaaggcgccacaacaaaaacaagtcagaagacctgccgataaaatttccgttattccaggctttcgggtgaaaggcaatagaacgaatcgtacaggtccattttattacaagtctccagaaattgtcgtgcatgaataactatgtaggcactaaatctattttgttaattcttaaaatataggtatgattagttcggagatattcattatcaaaagagacgggaaaaaagaagctttttccctcgacaaaatcaaaaatgccatatccaaggcatttttatcagtaggtagttttgctacacaagatgtgataaccaatgtgttaagccgtgtcagtatcagtgacggaacaaacgtagaggaaatccaaaaccaggtggaagtcgccttgatggcagaacattattacagcgtggccaaagcgtatatgctgtatcgtcaaaaacatttggaagaccgtgaagtcagagacaaacttaaattcctcatggattattgcgatgcttccaaccctgccagcggtagcaagtacgatgccaacgccaatgtggaaaataagaatatcgccacactgataggagaactgcccaaatccaatttcatccgcctcaaccgccgcctgctgacagaccgtttgagggatatgtatggtaaagaggcttccgaccgttatttggaactcctgaatcatcacttcatctacaaaaatgatgaaaccaatctggcgaactactgtgccagtattaccatgtatccctggctgatagcaggaacaacagcagtaggaggcaattctaccgccccgaccaatctgaaatccttctgcggaggatttatcaacatggtatttatcgtatccagtatgctaagcggcgcatgtgccactcctgaattcctgatgtacatgaactatttcattggtttggaatacggacaggactattataaacatccggataaactggcagacttgtctctgaaacaaagatcgatcgataaaatcatcacagactgtttcgagcaaatcgtatattccatcaaccagcctacgggtgcccgcaatttccaagcagttttctggaatgtggcttattatgacaagtattatttcaatagccttttcgagcactttgttttccccgacggaagcaaacccgactgggattcgcttagctggttgcagaagcgttttatgaaatggtttaataaggagcgtacacgcaccgttctgacattccctgtagagacaatggcactcctgaccaaagacggcgatgtactggataaggaatatggcgacttcaccgctgaaatgtatgccgaaggacattcattcttcacctatatgagtgacaatgccgactctttgagtagctgctgccgtctgcgtaatgaaatacaggacaatggctttagctatacattgggagccggaggagtctctaccggttcgaagagcgtgttgaccatcaatctgaaccgttgtatacagcatgctgtaaaatcaggtattctctaccctttcttcctggaagaagtagtagacttggttcacaaagtacagcttgcctataatgagaacctgaaattattgcaggcaaagggtatgttacctttgtttgatgcgggttatatcaatatgagccgccaatatctgactatcggcgtgaacggactggtggaagcagcccaatttatgggaatcgacatcaacgacaatccgaaatacgaggcttttgtgcaggagattctcggcatgattgagaaatacaataagaaatatcgtaccaaagaagtacttttcaactgcgaaatgattcctgccgaaaatgtgggtgtgaaacacgcaaaatgggacaaggaagccggattccagacttaccgcgaatgttacaacagctatttctatattgtagaagacaaatcgctgaacattgtcgataaattccgcctgcacgggcatcgttatatcgagcatctgacgggtggttcggctttgcacatgaatctggaagagcatcttagcaaagagcaataccggcagttgcttcgtgttgccgctaccgaaggttgcaactacttcacattcaatattccgaatacagtatgtaacaaatgccatcatatcgacaaacggtatttgcatgaatgtcccgaatgtcacagcgagaatgtggattatctgacccgcgtcatcggatatatgaagcgtatcagcaatttctcccaagcacggcaaaaggaggccgatttaagatattatgctccggtacgctgattatgatattgtttttcaggagataccggatgaggtgacattagccatcaacctctccaactgccccaaccattgtaaagggtgccacagtgcatatctgatggaagacgtaggagaaccattgacggaagaaagtctttctaccctgctcggtaaatatggaaaagcgatcacctgtgtctgtttcatgggcggtgatgcttcacccgcagaagtggaacaattagctgcttttttacacaagcagaccatcactccggtaaaagtcggatggtactccgggaagagcaagctgccggagcactttgatgtatctcatttccaatatataaagttaggaccttacatcgagtctctgggaggattaaaatctgaaacgaccaatcaacggttgtaccacatagaaaatggaataatggaggatataacttatcgttttctcccccatcattccaaaaagatttcttaataagagaaacgctcaaacggagtatgttatatttaccgtttgagcgttcttttttctaactacttcttttcattcgtatttatgatttcagtacccgcttcaatctgtttaatccttctatcaaccgctgtcgcggacacgcaatattgatacggataaacccttcaccagtctctccatacagactgccttcgttcacccaaagtttttctttcttcaacaagtcttttactatttctgctgacgtttgattcaagaccgagcaatccacccaaaccagatatgtaccttccaacatcattacgggaaattccggaagatattcatcaaaataaccttttaaatagatgtaattcgcaaacaaatagattttaagttcttccagccattcttcgccctcattgtaagcagccatcaacgcctccactccgaaaggattcacatcacaaacttcatttatattaatcgctttatctattctcacccgtacatttgcatctgcagaaataatattggctatctgaagccctgccagattaaaagccttgctaggcgaaacaaaggttaccgaattcataagaaactcttctgatatagaagcgaaaggagtatattcatgccccagaaaaaccaattcacaatgaatttcatcagcaaccacaaacacattattccgaatacaaatctcacctatccgccttaactcttgtttgctccacactcttccggcaggattgtgcggattacataacaacagaagtttgaccttcgggtctgaagctttccgctccaaatcatcaaagtcaatctgatagcccctgtttctatataccaaaggattggcaatcatctcgcatccgttattacggatagaggagaaaaaacagttatatacaggtgtctgcaccattactttatctccggacagtgtcaacgctttaatcacagcagatattgccggcacaacaccggtggtgtaaataatccactctttttctatccgccaggcatgtcgtcgaacaaaccaatttacaactgcctcgtagtatgcatcaagtacacatacatatccgaaaattccatgttccacccgtttcttcagtgcctccacgacagggggagccgtacgaaaatccatatcagctacccacatcggcaatacatccgcatcttcagccgaatcccatttataagaattcgttcctctgcgtggaataatttcatcgaatttatacttcatatttcaattaaaacaggttagatcatcccaaagtttcaattcgcaatttgctggtgatttaatattttcgtccaaaatgattgctccgaaactttcggcaacaatacttcccgtacgaggattttttacgctatgaacgggacttttaatcgttgccttcacactactgtgttcaaaagcaaggtcagcatcttctgccatcgtacaattttccatcaccagatcatgtgcgtagcaaagcggttgagtccccgaaatcctgcaatttaccaaacgtaagtttttagaatgccatcccagatattctccgttcaactcggaatcatagactgttacattttccgtattccagaaagcatctttggagttgataactgcattatggatttctacattcttgcaatattggaacgaatagttcccgttttgggcatagttttgtatcttaatattctcactgtgtataaaaaggtaatccgctttatcaatctgtacgttcttcagctctatattacgacaataccaaaacgtttccaaagcattaggcaactgcacgttttcgagttttattccgtccatttcacggaacatcttcggtgcttctaccaaggtatctgccatttgcagactttgagagtaccatagagcagcacgggctccctctgtaaagagacagtttttcacaatgaatccgttggtatgccaaaaaggatattttccttcaaagcgacagttgattgctataatattactacattctttcaatgcagattcaccggcgtgaattgttacatcttccagttgaaggtcgtgggtcgcgaacagaggacgttcgcctccatattctttatttcttatttgttccattagtttattctttaatctgttatttcaaaagttacatttacgcctcctgaaccaagggcggaggccagtcctgaaggatttgttatacgtcctaaacgggtataagtatatgaagtggaaaaggtttcataaaataggaccacacaagtggaaccgtaaagcatcaagtcacctgtccgaatagtcccgggattggacgacgctgtcggcaaaccattcgacagataataatatttttcattaccatgcagttcagacatatccactgtcatagggagtagtctcttaaatgctttcgcagtctcattattttccaatgtggcattgaatgaaacaggtccgattgttattttaagattattgctcactggggtatcatcgttattgtcgtcattatcatcgggattattgccattattgttactgccattatcaccggaaccagaaccattacccggaatcacttgttgacctgttccctgtatgggtttatcttcgctacatgatgcggaaccgatcgataatgtcagcatagtaagaattgctattatatagtatctcatatttatagtattaaaacttatttctttagatattccttaaagaaggattccagtttattaaatggaataaggctcacacgatcgtaaagatctacgtgtccggcaccgggtactatatacaattctttaggttcggcagccaatcggtaggcgtcttcactaaattcacgtgagtgggcattttcaccggtaatgaaaagcatagggcggggtgaaatagtctcaatatcttcgaaaggatagaaattcataaatttcacattacttgaaagtgtaggatgagtggtggtcataggagttgctccgtcgggggtaaattctcctctttgtgtacggtagaactcataaaactcccgttcaatcggactggacttttctgtcagttgatgtacagtaccacctgtatatttagtttctccacctaaaaattcagcataacgctgttctgccgcttcagccattatttgctttctctgttccaatgtcaatgagtgttttaacccattacggctagccgtacccatattgtacatactgattgtcgcaatggctttaaggcgagggtctattttcgctgcactgatagcaaaacttccactgccgcaaataccgattactccaattagattccggtcaacaaacggacgggtacctaaaaaatcaactgcggcactaaagtcttccgcataaacttccggcagaacagcattgcgcggctcgccttcactcccaccccaaaaagacaggtctatggagagtgttacaaaaccccgttcggccattttcgttgcgtaaagattcgcgctctgttccttgacagctcccattggatgtccgacaatgattgcagggtatttgtccccttctttcatattcttaggcagaaacaaatttccggctaccttcattttatactggttggaaaaagaaactttctccacacttaccaaatcacttttataaaagttatccgcatctgtctgtgcagaagaaaaactagttccaagcatcatcataaatacagttgttaataataaaattcgtttcaaatctcttatttttaattattaaagaattgattgtctactttctacattacaaaaatacgatgaaagaaagagaccgtttgtagatgaattactgacataataaccccaattacggattatatttttttattattctgttacaatattgatattagcctgcttccggatatgtgctacgcgaacccgcagataaacgaatacaatactcgcaatcaggaaaagcaacgagccgaaaacagaatatcgtgtgcccatctctgtaataaaagctccgcatatagctgtgccaatcgtcgttcctaaattggctgaagtcagaaacattccattggcaaagtctggagcttcgggagcggcatctgttatcatatattgcatattattacttgctatacccgccaatacgcctaaaataaggatgacaattaccatagctccaatccattctccaacgatgaacagacagatatatgaaaccaataatgcaaaaggcatgaggataattgaacgtttggcgtttattgatagtagttttcccgccatcacattacccacaatatttgccaaaccatatacgagcaacactgcacttatcacattatatgggacctccgttacttttttcaggtaatccgacatatagctaaagaatccgaacatagctccattaattaaggtaacagcaataattgaataccacatcgttgttttcttcaatacgctaagctgtgcaccataagatactttttcttttacaggcatggaagggataaacagaatcgtagcaacaaagactaatgcgtttacaacagtgaaaaacaacatcgccatggaaaacgaaacttcgctggcaataaaactggtcaccggaacgcccagcaccatgccggcggacacaccgacaaagactttagaaacagccttgggagcctgttccttgctgacagacgccgcggctactgtaaaagccatagagacatataccggatgcaggaaagcgggaagtatccgagcaatcaacaatactgtgaaattagaggtgaacatggatattacattacttattgtaaacaatcccaatgccagcaacattactttcttccggttaatccccgaaaataataaaggcgtcacaggggctgacgcagccaccaccaatgcaaaaacacttaccgtccagccggcttgaggtacggaaacattaaaagttgtggctatcaagggcaggatccccactactcccatttcggtgtttataattccaaatacaccgaccgtaaggataaagacgagcaaaccgcccgaattgagttttaatttatttttttgttccatagttactatatgctatttataattccaatcccattttataggcgttttcaagatgtactttatcaatctgccgtgccagtttctcgcatccggtacaaccgccggcacaatataatcccacttcattccaacctaacgcctgattgagaagacgaaaatatcgtatgggctgttcgaaggtcgtatcattatcatcaccggctgtcatcagcaataccgaatctttttgaggatatttatcatcgacagaaatggcataaagtctatcaatgaacgatttcagctttgctgtaattgtccaaaagtaaagaggagaagccataaccactgtatcacattccgcaaacaaaggatatatatcctgcatgccgtcgcgaacagcacactgatgtgcaagacgctggcacactccacatccccggcacccttctatccgcatattacccagataaaccttcgtcacagaatgtccgcgctctaccaatcctttaatgtatgcatcggtcagtcggtctgtattgccgcgttttgtgcctgcactcattattacaagtatctttttcatatttccctgatgtattttatcgattagcgaaggaagcgaagcgtctgtcgtttctttactattcaaacaccgataaatagtcgtaccacctaatagtacgcctccggttgttagtaacacgcttttcaaaaaatgctttctatccatattctctcttttattaatttcctctgattcatcaagttttatttaacatggcaaaggtcagaagaatataaagaagccgttgtagacggattacgggtatgataaccccaattacagattagtcatttccctactatgaaaacagaacatttatctgtatctttgttaccgattccaaataccaaaagccatggataaagttataaaactagagaatgtaaatcagtataacgaactgtacggactggaaacattgcatcctttggttagtgtcatcgacttgaccaaagcaacgaaaacagttaaccatatccagatgaactatggtctttatgctcttttcctaaaagagagcaagagctgtgacattaaatatggtcgtcagtattatgattaccaagaaggaaccattgtctgttttgccccaggtcagacagccggtgtgagtaccattgaagatgaaatcaatccggctgtttatggtattattttccatccggacctgattcgcggcacctcacttggaaaagatattaagaaatatactttcttctcttatgcagtaaacgaggctttacatctttcagatcaggaaaaggaaatagtcatggattgcctgaagaaaatcagtatcgaacttgagcatggtatcgataaacatagcaaagcattaatcgccatgaatatcgaactgttactgaactactgtatgcgtttttatgaacggcagtttatcacccggaacagtgccaataaagatgctcttacaaagtttgaacaacttctggatgaatatttccaagatcaacttcccatacaaaacgggttaccttccgtgaagtactttgctgataaagtctatctctcccccaactactttggtgatatggtaaaaaaagaaacaggaaaaactccacaggaacatattcagaccaaagtaatcgaactagccaaagaacgtattgtcgatacggaagaaaccgtcagccagatagcttattcgttaggattccaatacccgcaacatctctgcagattattcaaaagacgcgtcggatgcacgcctaatgaatacagaaatcaggctttagcataaaaatatagtccctcaaataagggaactgtaatataggtaaaacaatccgtaattcatatacaaacagatttcaaatcctgctgtatctttgcagtgtcataaagaaataagtaaaaacattatttagaaaaactgtttgatatgtatttagaaaatatttattctcctgcagatgttaagaaactgtcggaaaaagagctaaacgaattaggtggagaaatccgtgcagcactcctgcaaaaattaagtgagcatggcgggcatttcggacctaatttcggaatggtggaagcaacgattgctttacattatgtattcaattcgcccaaagacaaaattgtatttgacgtatcgcaccagagttatgtacacaagatgctgaccggtcgtaaagatgcgttccttcatccggaaaaatacgacaacgtatcaggttataccgaaccgcaagaaagtgaacatgacttcttcatcattggacatacttccacttctgtcagtctggccagcggattggcaaagggacgtgaccttacaggcggcaatgaaaatatcatagccgtcataggggatggttctttaagcggaggtgaagctttcgaaggattggattatgtagcagagcttggtactaacatgattattattgtcaatgacaatcagatgtctattgccgaaaatcacggtggactatataagaacctgaaagaattgcgtgacagcaacggtcagtgcgaatgtaacttcttcaaggctatgggtctggattatatatatgtaaatgacggtaacgatgtacaggcgttgattgaagcattctccaaagtgaaagatattcagcatccgatagtagtacacatcaacactttgaaaggtaaaggttatgaacgtgccgaacaggataaagagacttatcactggcgcactccattcaatccggaaaccggagaagcaaaagtcagttatgaggaagaagattacagcgaagtaaccgctcaatatctgctgaaaaagatggaagaagattctcgtgtggtgacaatcacttcgggtactcctgccgttctcggattcactccggaccgccgcaaggaagctggcaaacagtttgtagatgtcggcattgcagaagaacacgcagtagctcttgcttcgggtatcgcagccaatggcggaaaacctgtttacggagtgtatagtacatttatccaacgttcatacgatcaactttcgcaagacctctgtatcaataataacccggctgttttgttggtattctggggaacactgtccggaatgaatgatgtaactcacctctgcttcttcgatattccgctcatcagcaatattcctaatatggtttatctggcaccgacttgcaaagaggaatatcttgctatgctagaatggagtatccgccaaaatgaatacccggttgctatccgtgtaccggcaacagatgtaattacttgtggggaaccggtggagactgattatagtgttctcaatcgctataaagtgacgcatcgtggatcaaaagtagccattcttgctttaggttcgttctatggattgggacagtcggttgcatcacttctgaaagaaaaagccaatattgacgcaacactcatcaatccgcgttacatcaccggtgtagacaacgaactgatggatgaactgaaagcagatcacgaattagtgattacgttggaagacggtgtattggatggcggtttcggtgaaaagattgcccgttattatggtgctacaaacatgaaagttctgaactttggagctaaaaaagaatttgttgaccgatatgatatacaggagtttctccgtgccaatcatctgacggatgaacagattgtagaagatatcacagcagtgatcggttaaaatcaaacccattcactatatattcaggtaggttgatgtatacggtctttaaggacagttgagttgcatcaacctacttccattttcattcaaatcagccaacttattatttaaattcattatattcactattcagttcagtaattccccattcagttcagcaatcctttccgttcaaatcaataatcctttccgataattcaacggggtctgtcccgcatttcttttaaagaacttacaaaaaccggctgcatcactaaaccccagtttagcagcaatctcgccaaccgtaaatttggtagaactcaataaagtacgcgcttccattactaacaattcattaataaggctattgatagtcttacctgttccaagacgtacaatgcgtgccaggtactgttcactaatagccagtttatccgcataaaagctcacaaaatgttcttccctgaaattacgggtaacaagtgcatgaaattcttgcagaacgtggtctttacgactgatctcttttttgataacggtctttcgggaaagaaaatctgctatatccaaaaacagagaattgcacgctgcctgtatacgccggaaaaggaaatgatgttcaatattcatcagatgcatcaatacttccagctccttatggatgatttgagcttcatactctgtcaactgaatcgtatattgcttattccgcctcatggttgccaacaggattgccgtgatttgtgtcagatatgaatcgtccgtccgcatagattcggaaagggcgagagtgataaatttaatatcccggcttgaataaagatgttccgtgagataatttgctccgtgaataagtaacatattcggttctatcgcaataaactctccattcagtagaatttccgaacggccttcaagaacgaatatcatataaagctcccgattgaaataacattcatttgccggataacttctatctttatattcactccggaaacagactacctcctctttataatgaggaagttcaggatgctccttcaacaattgtgtattatcaaatatacgagattttaccatttacacctttattttatgacgtaaaaatacgatttgtttcggatatgacaaaaactgtatggaattagataatctatttcagagtaaaaaacaagacctttgcatatccttttcaatacatgagaaaggaatcaatagaaagaggttaaaaagacatggaaatgaaagagatttttaagaggtatttagtgtttgttatcggactctattttttagcggcaggtatcgtgttgattatacgctcggcattgggaactactcccatatcgagcatcaattatgtattaagcctgaatagtcctttatcgttgggtacttgcacatttatcatcaacatggtgcttatcctgggacagttctggttaatccgaaagaatagaacccgacaagatattattgaaattcttcttcaactaccgttctcttttatcttttcggcattcattgatttcaatatgatgctgacaagcgaactgcatcccgctaattatggtatgtcgattgctttattacttacaggatgcatggtgcagtctatcggagtagtgcttgaactgaaaccaaaagtagccatgatgagcgcagaagcatttgtgaaatatgcatcccgccattataacaaggaatttggaaagttcaaagtttattttgatattactttggttacattagccgtgattctctcgctgctgctgactcaaggtattcagggagtacgagaaggatcactcattgccgcttgtataacggggtatatcgtcagcttcctgaatcagaagataatgactagaaaaaccctccatagattactgccggtctggaagtaagccctatatctatttaaaataaacgccttataaaaggagtcatataaaaaggtcaatataagaaaatcactataaaagaaagtcgcttctctgttagaatctgattgattctttcaaagaagcgactctttattttagatataattatactcgtatttacttcttctgactatctatctctttcagaagttcatccacagccacctttagttgggtatcctctcctttgactactgtttccggattattggcaacctttacatccggttccaattgggtattttccaaataactgccgtcaggcaaacgataaccgacgataggaataccaaagaccagtgaaggatcttgtaaagtttcccaagacacacttgtcatagtacccggaacaggcataccgacaagtttgccaatcttttgatgtttatatacccacggagttccgtgtgcattcgagtagttggcctcacattgcaacataatggaaggtttgttccaacgacggctcggcatatcacaggcttcacgtccacgcactacttgtgtgaaatacttctgaccactgaacagtatttcaatatcttcatgcagacggccaccaccgttgaaacgggtatcaatcacaatgccttcgcagttgttatattttcccagaatgtccgagtatacagtacggaagctatcatctcccatcgactgaatatgaacatatcccaaacgtcctttcgaccatttttcaacatctgccgcacgttgttttacccaacgtttgtataacaatccattcagttgcccgttggtgaccggcatcaccacttcttcccaacgctctttattttgtggattgtagattgaaatcaatgtttttttccctgctttattattcagcagacaggctatgtcattatcgagagttatctcttctccattaatcttttcaatgatgcaaccaacctttactttggtacgtgaatgatcgaacggacctttttctattacttcggcaatctgcattccttttccctgataatcccagtcgaacaaaagtccgagattagaagtgacatctccttttcctttgggagaataacgtcctccggtatgtgaaacattcagctcacccaaccactcactcaataattctgcaaagtcataattgttatcaatatgaggcaagaacttacgataagcattagtcatagcatcccagtcaaccccgtgcatattgacattgtaaaaacgtttttgatgttgtttgtacacatggtcaaacatcgtttcacgttcggcagccaagtccattttcatttcagcctgatagctgatggacttcaacgcatccgacttggcatccatcttttgcataatccggcttcccaacaaaaagatatctccttttttgtccaacatcaacgatgcccaaccggtattgagtttgtgcagacgcttcgtatctttttcacggagattcattttccaaaggtcatatccaccttcgaacgcggagaaatagtaaagatcttccccgtcttttgaaagtatggcactacccaagtcggaagaattgggagtcaaacgtacgatacggtcttcaatgccgttcagctcgacaagtatctctttttgatctgccttatcatcagcagactcatcctgattactgtctttgctgctatctactttgctcttttccttgtcggccttgcttttatcagtctttcccttgttagcatttcctttatctgctttttccgccttagacttctttccgtctttcgtcttctcatcgtctttctcctttgccttcttctgttccttttcaaattccttgagtaattcgaaatcttccttactcaaacggtaacgatcataagcatcctgattgagaaacaccaacatcacatcttgctgcgatccccaggaagcgtgcgcacgcataccatagcgttcggtttggaaaagaatagcattcccatcgagtacccaacgcggagcaccactgatatatccactatttgtcagattagtaattgcccctccctgtgcgctgacaatgcctacatccgaataaggatcgtgacggttgcctataaattcaagagtgaaccatttaccatcaggcgaccattcgtaatcgaatcctcctccggtgttataccatgtagaaccatccgttacctgacgtaccttttttgttttcaaattgagtaccatcaaacgattacggtcttcgataaaagccaattctttaccgtccggtgaatattgcggataagtacgttctaccgttttagacggtaataatacttcctcttcaataagagtggcattagggaaattcgggtcttccttacgacttattttggcggtataaagttgccagttaccggttcgctcgctggcataaaccagtgtccggttgtccggagcaaaagaaacggcagcttcttttgccggagtatttgtgatttgcttggtggtagcataatcagttgaagtcacgaacacatcaccacgtacaataaaagcaatttgtttaccgtccggagatacagaagcggaagttgctccctgtgagaatttaagtgtagcaagctgctgctcatcatcacggaccaattctacttttactttttccggacgtgcaccagacttctgtgtgtataactcaccatcataggtataacataaggtacctttatcgctgacagacaaaaaacgtaccgggtgagttttgaaagtagtcacagctttcacttcctgtggagtattcaaaaagaaagtatacacattgaaggaacctccatcacgctcacttaaaaaatagacagcattaccatcaggtgcatacacaggattacggtcctctcctccccggtttgtcaggttcgtatgttttcccgtttgggtattatataaccagatatctctcgtaatggaagaagtatgatgctttctccattcatcttcaaaccctttacgatcctgataaagaaagttcttccctgttttatcaaaacagaccagttcggcaggagtgcccagcacttgctcggtacgtccgccggcaacaggaactttatataattccgtcatcgctcctgtaggaaacagggcactgcttgccggatcctgtatagaggcagagaaaaagacatactttccatccggagtaaaagccgacggtatttctgatgcagaatgataggtcagtcgccgggcggcacctccgtcagcaggcataatgaataagtcaaaatttccattccggtcactggcaaacgcaatttgcttgccatcgggcgaccaaaccggattggcttcataagaggtttgtgtggtgagttgaacagctgttcctccttgtgcagggactttataaatgtcacccttgtaacaaaaaacaatttctgatccatccggtgatatacgtgcatcacgcatccacaaaggagtaattgcatagctggataatgctgatagtaccagcgctaaagaagttattagtttcctcatatcaaattattataaatttattccgataaatcggtttgaattagttttcccgtgtaattataaaatgtgctgtcaccaaagtccttgtaaaagaaggcatatttatccactcccgtacaatgacaaacgccaatctgtcggggaagatattcctgtaaataatctgcaatgacctgatatttttgtttttccgcattatggatatgaaaacctcccagaagtaacttacaaggagattcgggaaaggcagcctgaaccgtacgcaaaatattggttattccccgatgagaacaggcacttaatacggaaaatccttctggttccaccaataccaccgccaattcatcctgaaaagtatccggtattttgcatccatcttcttgctgaacccaaaaacgttcaaaatgggtatctgcctgatttataatatcaatagagggaaaaaggaaaactccgggaagcagttcggtctgctttgtaataaagcggaaacgggaacgatcgaggttttgtgtatgcatcatcccgttctcacgttcatccttgaatttaggagaaaaaacctcacgcttacagacaacggttgcctgcgtattcaattcaaaaaaataacgtagtccgcccgtatgatcgctatgaccatgagataatatcaaataatcgactttttgcaagtcaatatgcaacaagcgggcgttacggataaacaagtcggatgctcccgtatcgaaaagtaaccgatgtcccgatgtctcaatataaagagaaagaccatgctctgcctgcaatttacgtccatagacacaattctccacaagagtcgttattttatagcccatgacacttagttagttatcaaacgaattatacaaaataaaaagttctgccacaaaattataataattctgtggcagaacaagcaatccagtcaattaagtaatcgtaaaaaggggaaaaaggtgagggtagtgagggagcaattccaaccttttatttttatattttattttttcctatctatattttctctaaaaaaaaacacgaatgttagaaatcctccctcactaccctcaccttttcccctcttcttataaaaaaagacggcggaaaatctggaaaacataaccgtcttttccagatttcccgtcaggttttaaaagttaagttcaaaactatatctcaaatattcgaacaaatccatttatcatattctttatgaatatctttaatatggaaaacaaacagttacaccatctttcccatattatatgcttcctgcatgtagggagtatctttaatctctcctactttccatgcaccgattccatagaccgtccctttttccagtggtccttccaagcaatcgaggaagccacggaagccgtcgatagtacgctccatcattgctttatcgttttctgctgccgcaataatgaaataaaattccttattggttatttccgtataacgtgcgcaacagcggtcaatcattatcttcatctgcccgcacatggtgtaaaaatagaccggggttgccattacaatcacatcggcagcaatcatcttctccacgatttccactgcatcatccttctgcggacaaggtttaccgtacatactgcaaacactgcatcccgtacaaggatgaaccgttttgtctttcagaaaaatcttctctacttcattgcccgcctcaatagcacctttcataaattcatcacaaagcaaatccgaattaccacctttacgtggactggacgaaattatcaaaacttttttagccataactttcttttattactttcatctttcagaattaatcagtcttttcactctgcaaaaatagacaatttataacatagcgaatgtatataaattacagagaaatatacccagattacagattcaaacataacaaaagattttttctaccaatatttaatttatatctttgtccacaatacgaacaacatgatacaatgaaaaaaatacaactgaccgacacacataaagaaaagctgtttcaaatccccctttttcggaatttgcccttaaacattaaagaatccctattggagaaactagatttcgtagtctatatagcaaacaagaaagagatagttgttacgcagggaacgccttgcaacaaactgtatgtgttgttggaagggaaattgcgcacggatattatcgacggactgggaaatgaagtgatgattgaatatatcattgcgccacgcacttttgccactccacatctttttagctcggacaacacattgccggctactttcactgcccttgaggacagtgtgatacttatggcaacaaaggattctacctttaaagttatcagccaggacccgcaagtattgcacaattttctctgcattgcaggcaattgcaatatctgtaccgtatcacgtctgaaaccactctcccgcaagactgtccgggaaagatttatcgtttatctgttcgagcacaagaagaaagattccctgatagtggagattacacatacgcaatcccaacttgccgaatacctgaatgtatcacgtcccgccttatcgaaagaaattaataagattatcaaggaagggcttatcactatggaagggaaacgggtggaaattttgaataaggccgctttagagaaattcatataataaagaaacaggggcagggttgaaactaaggaataatttggctcttatatcgaaaacaagttaaatatataaatgagccgaagagaaataaaactgtttttgctatatttgcaatcagaaagaaaagcaaaaaaatatgacagatgaacaattagggcaaatgaagcttatcttcaattacaacgatgtattctacagcttcttctatgatgacctcagcggctgcgtacatcgttcccgcgaatatgccatcaattacgtctattcgggtgagatgattctcgacaatggcaatgagcaaattcatgtcggaaaaggcgaatgcgtcttcataccgcgcgaccatcacattacgatgtacaagaagacgaaagatggtgaacgctactgcggtatcttcctgatgttcacacgtcgtttcttacgtgaaatgtacggtaagttggaacaacgtaaagtaccgaccaataccgcgaaactcaattccggagtgataaaacttccgaaaacggccgaactcgccagtctgttcgcttcgatgacgccctacttcgatccgaaggtgaaacctgtggatgacctgatgcaactgaaattgcaggaaggtctgctcgcattattacatatcaacaaaaagttcgcgccgacgcttttcgacttcaatgaaccgtggaaaatagatattctggaatttatgaacgagaactacatgtacgagctcacgatggaagagatggcacactacacgggacgcagccttgccacattcaaacgggatttcaagaaaatcagcgacctcactcccgaaaaatggtttatccgtaaacgactcgaagtagcttacgccctgatgaaagagggcggcaaaaaggtcgtggatgtttatgccgaaatcggtttcaagaacccgtctcacttctcaaccgccttcaaaaaacagtacggtatgccgccgaccgacacattcgtgtaaatcggagcaaaatatattgagttttttaattaaattatttaagcctcactgcgacatcgcagtgaggcttaaatatcaacttacagcttgttccttacagtaaccttacggtaagggcagccctgataatttaccggaaaatatagagtatacaatcttcatagcaatgtgtatgctgatgccatattgtccaccgccaaacttgattatcataaattcagaactacttttcctgccatttgcatggagcttttaagaaaatagatagttgagcttttgagtaactccttttgagcccgacaataatgtgccgcttattttatagccgtacctttgcaatatgaaatagaacaataaccatttaaataatagaatgatgagaacagcgaattttaaatccgcagctatcgcagccttgttaagtatggggttgcttaccggctgcacgaacggtattacaaatcaaaaaacaagtaatcatatggacacattgaatcttacacaggaatgggacaaaaagttcccacagagcgacaaggttaatcatcgtaaagtaactttcaaaaaccgctatggcatcacacttgccgccgacttgtacgaacccaagaatatcgaaagtaaactccctgccattgccgttagcggccctttcggggctgtgaaggaacagtcatcgggactttatgcgcagacaatggccgaacgcggattcctcacccttgcgttcgacccctcttatacgggcgagagcggtggcgaaccccgtaatgtggcatcgcccgacatcaacaccgaagattttagcgcggcagtggatttcctgattgcacaccccaatgtagatgccaaacgcatcggtatcatcggcatctgcggattcggtggtatgggactgaatgccgcggcaatggacacgcgcatcaaagcaacagtagcttctacaatgtacgatatgagccgcgtgaatgccaacggctatttcgatgccgaggacagtgccgaagtacgccgcaacaaacgcgaggcgatgaatgctatccggacccgtgatgcacagaacggcacggccactcccggtacgcccggtctgcccactagcatcaagggcgacgagccgcaattcgtcaaagactacttcgattattacaagactgaacgtgcttttcacgcccgtgccatcaattctaatggtgcatggaaccccacgatggctctttcgttcatcaatatgccattgttaacctatatccacgagattgataatgctgtattgctcattcacggcgaaaatgcccattcgcgttatttcagcgaggatgccttcaaacgcctcaagggcaacaacaaggagttactaatcgttcccggagccaaccacaccgacctttacgaccggaagattccgtttgacaaactggaagcatttttcaagtcaaacctcaaataaaataaaaacatgagtatatcaactaaaaataagcataaccacttgttgatgttcatcctcacactcggagtattcggaatattgaatactgaaatgggagtagtgggcatcatccctatcattgccgaaaccttcggtgttacggtgccggatgcgggttggacggtcagcctctttgcgctgatcattgtcttctctgctcccgtcgtaccgttacttttttcacgggtaaaccgtaaaacggtcatggtgctcgccttgtccgtgttcgtgatttccaacctcgtttcggtcttcacgacgaactttaccgtactgttgataacccgtgcgattccggcattctttcatccgctctatgtatccatcgctttctcaaccgcagcctcttccgttagtcgggaggatgctccgaaagccgtttccaaaatctttgccggagtatcggcaggaatggtgctcggagtgcccgtgacgagctacatcgccagtgaattttcattctctgcagcaatggtattttttaccgttgtcaatgcatttgtactgctcgccactattttcctcataccgtccatgcccgttaaggaacggttatcgtatggcacacaactcagcgtattgagaaagcccgtattgtggaactccttccttgcggcattactgatgaatgcagccatgttcggattttacagctacttgtccgattacctgataacggttacagatgtctccttcaaggtaatcagccttctgctgtttgtttacggcatggcaaatatcgtcggaaatatcgcagccggaaagttgttggcacaacgtcctttcgccacgttgaaatacgtacctgccatcatggcgatactttatctcgtactttacggactagggaaactgaccataccaacgtcaatcgtcattctgatattgggaatattcgcaggtattgcaaataacgggaatcaattcatggtatctacgtcggcaaccgaagcacccgattttgccaacggattgttcctgaccgccgcaaatctcggaacaacgttgggaacggcaatatgtggcatgttcataaccgtatggggaacacaatcatctccgttgggagctgtggcattcctgcttgtcggagtggcaagcattattatcaggaatagcttaatgagccgcaataaacacataatggcagtgacaatatgaagaaaacagaacgaccaataatcactttcccaaatggacaaactgtttgtccgttgggacaaggcacatggaaaatgggacaatccgccgcacggcggcatgaagaaatacgggcattacaacatggcatcgaactgggaatgaaccttgtcgatactgccgagatgtacgacaacgaggaactggtaggcgaagctgtccgcgactgtagagagaaagtgcttctcgtgagcaaagttttaccgagtaatgcaagctatcgtggaacgaaactcgcctgtgaacgaagtttgctgaagctcggaacggagtatatcgacctctacctgttgcactggaaaggacgccatccttatgaagaaaccgttcgggcgatgaccgaattgcaacaagagggaaaaatccgtttatggggtgtcagtaatatggacacagccgacatggaacgtattgtttcactgtccggtggaagcggctgcgccaccgatcaggtactctataacctcggcgaccggggcatagagttcgacctcatgccgtggtgcgctgcccgtagaatgccgcttatggcctattcgccgatcggagaaggacgacttctgcgccaccctacattggtggaaatcgcccggcgacacgatgtatcgcccgcacaaatcgcattatcgtggactatgcgtcaatccggtatcattgccatacccaaagccggcaatgtagcccatgtggaagataatttccgaagcctttccattcatctgacaaaggaagatttgtatgatttggataccgtgtttcccacaccgacacggaaaatacctttggcaggttggtaataacatgaaatgctataaattatgaactataataagaaaaatgaataaagtcatagatagtatgctggcacatcgttccatccgttcatacaccgacagaacggtaagcgatgaagatttaaactccatcatccgtgccgtacaagccgcaccgaactgggtaaacctgcaactcgtttccataattgcagtaaagaataccgaccatagaagacgtttagccgaattatgcggaaatcaggtacacattgccgaagctcccgtattcctcgtgttctgtactgattaccatagggtggctcttgcctgccataagaaagagcaaacgctcgatgaagtaatgcaggacattgacacattgctcgtgggagctcatgaagtcggtatcgctctcgaagcggctgtcgtggctgccgaatcattgggattgggaacagtccctattggagatgtacgtaaaaatgcgctggaaattgtccatgaattgcaacttccggaatatgtctttcctatgttgggattatgtatcggctaccccgcagaagaaccgggattaaagcctcgttttccacaacaggctgtctttttcgaagagacatataagactgatttaaaagataaactcgctgaatatgacgttatctacgcccattatcttaaagaacgtccatggaataatcgtgtaggcaactggacagacctggcagctgatttctaccgacatccgtttcattacaaaggagttgcggatgccttaagtcaacagggatttacctcggctaaaagcagatattcggtatagagatcaaagtcctaaaatcccggtcaacataagtcaaccgggattctcatcattctgtttatttctctaccatttagtgaaaaatactttcggattgatattcaacgatacccatccccaatcctgccagcttttatgattgccggttttcacagcgtccatcgtcttcgtaccacgcataaaagaatatccggcagagagtttcacatctttcatgatcgaccagttaatctgataatcaacttccgaacctaatgatttctttaaatcctgaactttaactgctgtactaaaataatggtaattaagttccatatctaccttgccagatagacggaaacgacctccgatacgagcatccatcaatcccggtgcataaccgtttgcaaatgtagaagcataaaaataatccattgctccatagaatttatgatgggtcccataaagaggatcaaaagccttatacttaccgccatttcctttatcaccgcttaaataatcaaaactagccacggctccccatgtctgattaaacgtataggcggcttgtatgctacccatcaaagctgaaactttctccgcagctttattcttacccatctgatagtagaaagcaccatccagattccagttactattcttataagtgaggtaagtacccattgtttgtaaatagcgggtatgagaatcatccgtggctttatcacccgtttccaatcccagattcataaacaataaagaagctccgaacggaacattatccgctttataatgataccagacggtttgcatattcttataaggctgtccggtagaagaatcatagtaagtacctccacttgttctattgtcattattctggttaaaagcaagaatcagatggacttcattatttttgttggcatatcccagcttcaatgcatcgtggtaacggcccgctacattccaatccagtcctcccaaaatacgttcatcatcataaatcaatgactgacgtcccagttgagcaaagaacccttcaccaaagttcagtttcgcccaagcctcattcaacataaaacgcccattcttctcaatctgcgggtcttgtccccaaacaccgacatgctgtgccgacatctttagttccagatccgaacgtttataatccatcgagaggcgtgcacggttattgatgaaagatgtaggagctaccccttcatcccgtggagtcaatgcaccattccgatactccgcacgaggtctgatttgcatagacatcgtaaattcattctctttctccgtgttttgtgtatatgccatgcttggcaatagcataagcaagaatgaccaataaagtgttttcattgatattgaagtttaagtgattcgatatttcaatttaaattataagtatgcacactgactccttgcgcggccggaaggtaattgattccataccagcacatttgcaacaggacaaatgatactaacagaataatcaacgcaggacgtgccttcaatggcttgcccaatctgaaatggatatacaccagataagcgaaccaggtagctgccgcccaagtctctttcgggtcccaagcccagtaatgtccccaggcttcttttgcccagatagctccggtaagcatacctaatgtcataaatgccagacctacataggtgaggttgtcacacaaatccatttctttccgttcaatctccttctttttgaaccaaagcagatagacggccatcaccgtcgccgctcccaacatagcataagcaaacatatacacaatgacatgaggggcaaaccacgggctttgcaaagcaggcatcaacgtcttattatgaatctccggtttgaagatattgatacaaataaagaccaatgaaaggatgcaactgaaacttaaaatccatttatacttccagcgtgcataggttatcaatcccgccaacggaaggaagaaagaataccacagccgtgtctctcccattgtccgcatcggaggacgttctaatgaaatccacattccgataatgaaactgaagaaaatagccagacctaagaaagtaaatccataagcccatcccgtttttgtacctttccaggcagcaaaagctcccaaagcccaacaaaccagtgcggctattgcaaatagtataaagtattcccaactcatgctttgtcctcctctttcctcttttgtgcgctgacaaacagacagatggctcctgccatcatcattattattcctgtgtaaacaaccggcaaccacggatcgcgaaccaactcgaagacactgatatcgctccatcgtccctttgtttcatcgtaactaagttgataaattttccaaccttctatctccatcgggcggttcacttcaatggttcctcccgtgatcgttccttcttgtgtgtaaatcttcacttccgatgcaaatcgctgcggttcccgttccggcattacaatactggttaaagaatccagccggattgccttatagggaaaaagaaaactaccgcaacttacccatccctctttggttgtttgattcttctgattgactgctttcagatagacagcataagtcgctcccatcgaatgaaattcagtaaacttcaaagtatcttcggtagccacagaagcagccatcggaatagattgctcaatagttagctgccagtcctgcaagctgccatttgtcactccctcttccaacaatacatgtacaggagatttttcgggaagcgtacggccggtttcattatcaatcaacatcagtttcggaggatattcgtcgatagtgaaatccttcagttcgatagccagcggaagttcaatcagttgacctttatcatccgtagcccgccattcggcacttcccatccgggttgtcattttcaacctttgcatatcggcatttcccaaagtggctgttatcagtgcaataaacaatccgatatgattcagtaggaaagaaatcctgctgatcttcaaagagaaaccggtgcgaaggattgtcagccccaaggcggtgaccatccaaaagtagagcaggacaaaaggccaggaagaaatcatctgcgaaaatcccagcagatcagccggagcatgaccggaaggagcctgccggatcagtcccatcactaccgtcatgccgaccacccacaatagagacgagacagcagcggaataatgactcaaccatccgaataaatagacacgtttgcgaagaaggtgcatggctaccaaagcaatgatataaaccactaacacaatcacattgaccggacaggcaaacaggtcccaatgtatggctcccactgtcatttgcagcaatagccctatcaccagtaatcctgcgccaatcaccagcccttctttataactccatggtttgctccacatatataaattctcttatttctgtgccagacggccgttttctttcgctttctccaaccatgccggaacagttgttttcaggaatttctccttagtcgctctttcagcatccatatccaagccgatatattcctgtgcttttgcctttgttgaaatgtccggcatcggaacatctcccgtatatccattctttgccaatactttggatacagccagacgggcttgcatggcacgatccaatccatgagaaagaattctctgaatttcctgcggtgcgtggaaagaacctccgtgtgaagctactccgaaatcccaacgccattgtgcctgacgaatcagtgcgagcacatctttcatctgtgtttctgtagcacccttgtcccaggcaaatttagcttcgatatgtgcttttgccaattcctgttccagacggttacggatttcattcgctttacgttggcgttcgtacacattattacgtaaagtctcttcactttcgcggtgacaaacctgacaggtgcggtcaatcatagccaacgggctttggatatggtgatcgctgaatttcacaccaccttcactcttatacggcatgtgacaatcggcacaagaaacacctctctgtccgtggatacccatctgacaaatctcatagtcaggatgctgtgctttcagaatcggagtacggctcaatttatgaatataatcatagaaaccggcctcatcataataagcctccatatcttctaccgtaaaacctttgtcccaggggaaagtcagatacttaccatcccctttgaaataatattccacatgacattgtgcacataccaatgaacgcatctcctgcggagtagctttagtgatgtctttaccctgacgttggaaagcctctatcaaagcgggacgactgatatgaagattcattgtttcgggatcatgacaatcggagcatccgataggattcacaatttcggcgcccatagccccccatttattgttatagaaagaatcgacacccaatgcctccatcatacggggaacatccggactcttacaagtccaacaggtagacggttgaggaccttcggtcgggctcatgggcgaaccggtacgcaaagatgccgtaatatcctcaatggcatgcatgtgtccccgtggagtggaataatcttttgagaaagcatatcccgcccatagaatcaccatttcaggacgtttttccaaagcatctacagcaatatttccattaaattcactctcaaagtcagtctttgcagtctccgtccaagtctggtattcacggggaaagtcattcttaaacagttcatttcgtgcttcaatccctttgataacgtttttacggttattgaaaatgctggcaacttccgccctccgttccatcaacgcagaaacgcataatcccaaaacaaatacaacgaccattgaacctccgaacaacagccatccttgccatgattttaatttcttttccattgtatatcggttttattattttattacgtatttcatttcttatttatctttctgattcaccatcttccggagccattcgggaacaggcgattccggaagaggaacaatcgctcccggagtaccggacagggaattctttccaccatgaggaacatcacgatggcaatcccagcaagccttcccctctcctacctgtgacatcatataatcaatcttccccgtcttcacaaattccgtattgagttgtgtatgacagcggatgcaattattcataatcacttcggaactggcttcatgagcctgaatgacctgcggctcgcttttggtaagaaatgcagccacgtgtttcataccgtccatacctttaaaggtccatttcttcacagcattttcatgcggcacatgacaatcattgcaagtggcattccgggcatgtgaactatggaaccaggttgcatagtaaggagtcataatgtgacaattcacgcatgcagccgggtcatctccaagataggtatgcgcccggagcatatacataaacagtgctcctccacccacaataacaccgccaatgatgacagccgctaccttccatttataagaaggaaagagtcgatttattattggaaacttcatcatacgaaaaagtatttttcacaaaagtaaaggattggaaacaaaaaaggtgtaatagatattacacctttcgaaagaaaaaatactcattacgtaaaaaaacagaatgggaatgtgtcaaacgtccctttttgacctcacctcattctttctctatgtattgtcttattcatcatggtgatggtcttcgtcttccacctcattacttaatttgatattgcgtgcgatataagattcgttacctgcggcatccgtgcaataaaccatcaaatgataatctcctgcagtagcattggccggtattacaatatcgtgatgatgaatatgggcggttttctgtccggacacatcgtaggatctgttgaaactaaaatctactgtttcctgtgcagccctgctattacctccgtgtgaatggtggtcgaaattactatgaatttcaatcttataggatttcagcatgacatcatccgacaaatccatttcaaaatgaaccccatgttcgtttcctatctccaaagcctgaccttcttccggttcgtgaagttcaatcagaggtttggtcgtatcactggagtcatcattatcacaagaggaaaacatgaaagtaactgttgccaaaaggctaatcattgggagataaaatttatttttcatttcagtaattttttaaatggaactttgattaatatctggaagttacgtcccggttcggggatttcaactttcctgtaaaaactaagatgattgtaatatcgggtatcgaatatattccgggcggtcagggttatttcaatctcattgtttccacctatcggaatattcaatgaaccacccagatgaaagagatttgctccggctgtacggtcttcgttacggtccactctattttgccgggcaatgctctgccattctgcatacaacatataccgattcttttgccaggttaatgtattgcgcataacaggaggtggcgagaaactcaatggaatatgttcatcacaattataggtgtaaacgtattcagcggaaatccgataattgaagttgcgcagaaaatcaacatctacggtagcttcagttcctgcaaatagcgcttctgctccggtatagcgatagatttgtccggcatgaggcaatacagaccactctccagtaggacgcagaaagatgtaattgctgaaccaactgacaaatggagagacggagaaagaaattccccggtacttcagatgataagaagcgtccagttgccagccttgttcggactttaggtttgcatctccctgttcatggcggaaagtgccgtgatgtacaccgttggcagccaactcattcgcaccgggcaggcggaaactacgcccgatattcacctttaccagatgtttgtcggagggagtccataccaatcccagagaaagagaataatcaccgtagtgcttattcacagagtgactgttccacttgtagaagtctatctgttccggatcatagccctgtttccgaagataatcggcaaggtaagtatcttcatgcgaagagatattcatatatccgtagtcatatcgcactcctccgctgactgaaaacacattgttgggtctgtatgtcgtaagccaaagcattccggtagtggaacggcgatattcaggcagtaaaaacgaatagccggaaatgtcgttccgttgatgttgtccatcccaccccaatatatgttcccacgaagaagaaccaataaaacgagctttcaccgaagcactgaaagtgttcagattaaaagcaagttccttatcggggtctttctccggtgcgggttgcgaaccatagtgagtatggaaagcactccactcttcacggtgattgttctggaaacctaaatcgcctgacaagatcagtttctcccatgcatattgctggtgggtggtcactttcaggtgattcactttactgaatggcaattcaatattacggctgtctccatcatcttccacacgtgacgcatcgggtatgccatgtgcccccggaaagaatcccgtcttttgatatacattactcacagcataattcgctttataggctcttcgttgatattgggtaaaaagtccgatattgcgttcaatgcctgctgtattcttgagtttacgcccatatatgggaattctttgtgtcaggtagacaatagaatccgtcggaatacgatagtcaccgaaatgttgttccgaataacgaatatgggagtaccaggcattcttcctgattcccagcatcagtgatcctccgatggttccattgactgatttacccagcagtgtgacatctccgaatacacgattatcagcaggaacagccgacggaacaacatcaatcactcctcccattgcatcactgccataaagcagtgaggagggtcctttcaatacattgactgctccgatattgaaagcatccagttctagtccgtgatcggctccccattgttgtccttcctgtttgattccgttttccaatacagcaatccggttgaatcccattccgcgaaccatcggtttggagaagcccgaaccaatatccattgcctgtactccgggaatattctccatcgcctgcatgaagtttcctgtaaaatgtttgcgcaaaaaatcctgatcggctacatcaaccgtaagggcagactttttcgcttgacgttgctggtacgtttcggttaccacaacatcaggcaaaagcatgctcttgattgaatcggatttctgtgcatggacggataaggttacaaatagccctattacgcccgaaataattccgatacgcatcaattacaatcttttatttaatgtgtaaaatgaatgtaaggatagattgaaagccaatctatctccattgaaaatatgagtatgtaatcatgcgaccggaggcccgcgtaaatgatgcgaataagttcgtttgcaaacaaccttatcctggtaaataatcggctcgtagggcacgagcgtcagtgtgcaatgaaattctatcggttgaggttcagtaaagaaagaaagggagtattggcagatcgcacaatcatcagatgattggtgagaatgctttgcatgggaacacgacttttcatcctcacttccatgatagtgaaaggtcttcactacaaagaagggaatgaatgtcatgaataacatccatgctatatatacccttatatttttcttttgatacattctccctctattgattaatagaatagcgggacaaatataacagtatgaaaaataatcagcaagttatacatcttaatatgtgttatcagtaatagagttcacctcccttaatgtccaaatctcttcatattcataagcctctcccggctttagtttaaccataggactgttcggttccatttccaaaaattcatcattaaaataaatcatgttaggaaaacacacctgcaaattattatcatatttcccctgtggaacatacttattttgtttgatatacaaataatcactgaactgatagaaatacataccgtttgtagtatttatcccatatttcttttgttcgtctcctccgggaaatgcggtaaaataatgattctctacatgaatacgttcctgcagatgatgagagggaattaatgtatctgctgacaatgaaatctcactaaatcccaatggatattgtgaatttggcatcgcttcacaatagtaaatcccaccggcaggcagtaatgtacgtgtccagaaacaatattcaacctccccatttgaaatattagacattcgctgtttaatatgcagaaccggctggttctcttccaaaaagtaaatccgctccacctgaatacccatcgcctgtgagggatggctgaccaagcgcaatttatcttcctcaataaaggtttgataaggtcctgcccaaattgaatcatggatattctccgttctacgttcattaccgatatcaaatctaccggcatcaggacttcgtcttgttcgtatatagttctctacagtccaaccgttgataacagaatcactccacaatatattatctccacgactctctaagccgaaatatagaatttgtccgccatacgtcggattaacaattacggaaacagccctgttagatagcttaaggcagttctcccaccctctgtaagaaactgtatcaacctcctgaaccggacgatgtgaacaggataaacagagaaaaaacaaaagaatgaatagtatatatttcataaaaggccaacctctcttgatttatttaaattcctttggagaggatttgagaagtcctctccaaaggatcattttataccggaataatttcgacagagaatgtagaagatattgttttattaagccagattacgaggcttcctcctactttatcactcaaatagtcactatcagacaccaacgtctttccaccaaccttgaccgttacatttccgcttccggtccaattatcaattctaaatacaggattcttcactgcgccggtaaggttacaagtaaactgacaacttcctgtacctgtcgttttcatcaaaaccatctcccgtttggaataccctgttacatccggattataagaaactccgttcagattcgtcgggcttcccatatacagccatcctcttgtatacgcatctatatcagaagccgcatcaggttgattgatacccaacagcatcaaatatactctatatttatttccatccgaattaatctgataagcagtattccaggaaacgtcccctttagcctccacgccaatcaatgaagaatgagagacctgtgacggccaggtagccgttgacttatcataatccccataacgggcatttaaatagggttgtttatctaccggccaatgagacatctgataatttatatcatgccaggtcaagtcattctcaatcggcaacggagagacttccggacgttcaggagtataagagaaaacagaaaaagcatcaggagcattatttaaatgagcagtatagatttgctctttccagtttttcacattctggttgacttcatcaaatggtttagccggataaagatcataccggttgcctgaaagattagaaatactaaaagccggttgtttcacatgatctgatggaatggatgaactgccggaaataaccatgggctcactcaactcatgatagcgataataagcctgtcccgcctgtttctgaatatactcgatgcgtctcacgcctactccgtcagcatagaaagtataatactcgtctacctccggatatatcccgtcaggataaggagccttataatccggatttaccaacgcataatggtacttaaccactttccttactttattattctctatgatatccactttcgcatgcgccaacaaacgatccgacattggctcgaagcatcctttactcaaatccgaccatgtttcagcaaactcataacaataaagcaattcgttattcatgtgccaagcaggtacaaagtttgcctccgaccagaaaacaaattgtctgttttgtgcagcagccgggcaatgtttcggattgaaactgattaccgtcgcatcccccggaaagccagcccatgtaaaattacgctgttttacatcaaattccggagaggactccacgacatcttcagccgaaaactcttcaaaacgaatatctgaaaagttcacttctgtcgagttttcattaccattcctgactatcggacaaataaaatagttctgtccctgtcctccccaatctttcgattgagcaagttcaatccagttctcatgaaatttcccatcaatttcttttccaacactcacataaaaatgaaagaaaccggatatcttattcctgatgatacgtgccttacctgtagaagctgtaaaaggaacagaaaaatagctattattgagaggtatggaataacggaaagaataatcgtttttatttatcttcttcgtattatccaaaacgttatctattccgtcctgacgatccaatacccgtacggtcgacacaccggattctgtacacacactcaccgaagtataattattgaaatccggtttcccgttcttctcccggacaatagccaagccaaagttagttgttttatcagctgttacctccgcaataaaatgtccctgcgcaatctgtggcagacaaacaccataagtagaattcttcccgtttaaccctatttttacagaggaaccggaaacatcaaaacgaccattagcccctatcgttaaagcgataggctgatactccgtaaccacaggaggagccggtttttcttctggattaaccggcatatagggatcatccaaagtgcaagctatcaggctggaaagcagacaagctgccaatatattattcattatcttcttcatttttattatgtattaataggtccgattgagatatacatttcacaatcaattgacttgatttaccgagagatatttcaattgcttctcaaaagccgccgctgaaagatgagtcttcacctgaaccacttcctcttttcccggtatcagcgttacgtaattctgctcaaagaaactttcatcgtcatctacataaagataaagccctctaatcagtgcagaagaacgaagccgtaaattgactccttcattggtcttctccaccgttataataggagccacctttgaataagtatactgattggagtagaccggataatggatgttcgaagaaaccgttttaccattttcattcaacgtcacataaatgaaaacttcgttctctttcttacctccataaagttccgtagttgttatcgaagccacatcttcacacccattagcacccaaatcaaatgaaactttctttgagaacaccgtctgtccctccaaagtcagagtcgttatctccaactctcctttcatcttttgcaaacgatcggaaatgaccttgaatacgacttgttttccggaagcataaggagaaaccaatacctcgtcatatgcatcgcgggcataatactgtaaagccttccatctgccacaataatcaatacttgaccacgaagctaccggccaacaatcattaatctgccaataaagtgttcccatacagtagggttttgcacgacgatgagcttcaattccaatcttcaccgcctccgcctgcaaatactggctcatataaacaaatgcactaaaatcatcgggaactttaaaatatttctccatatacatcttcatcatattattcccgaaattcggatcacgagtctggtcattgcgggcacgctgatgagacaacataacttccgaatccaaacgcaaatcatgttcacttgcaaaacgacggatggtgcgcatctccggataagactgaaaaccatactcactcataaagcgacctatgtttttagcttccgtgtactcttcaagccatcctcctttccagacagaccagaagtgtacatctcccatattataatctatattattatagccggtcacaggagatgtcgggtgataatacctcgtttcatccacagcctgtatcgcttccggaattacgtcataaaagagtttatgcagattactctgataaattctgtcttcttcgggcgtataacgatctttccatccccatccgaaatatgaaatctcattttcattgtttccgttccagagtgcaatgcaaggatgattacgcaagcgttttacattatccttcacttcctcggccacgctattcaaataatgctcgtcagcggggaacatgccacaggcaaacatcatatcctgccaaacaagaataccgtatttgtcacacatttcataaaacgcatccatctcataaatacctccgccccaaatacgcaacatattcatattcacatcagctgccgactttatgatatattcgtaccaactttcaggcaccctgttcggaaaattatccaaaggaatataattggctcctttcataaagaccgcttttccattcagcttcacaaacattgactgcccctgttcatctttttcacgaactatttccaatgtacggatacccgtctttacacggtctgtcaccttacgtccttctttatccaatacaatatcgaaatcatacatccggggattgcctaatccgttagtccaccataattcaggattcttcacttcgaagtccacccgtaccgtgttcatccctttagttaatgctacttgtttacgaacagcctctttcttatcatattccactgtaaacgttgccttcgtatcctcatcactcatcaccgtacaaacagcctccatcttcgcttttcccgactccagtttccgggtaataatttgagttccatcgatatggatatcatcccagtattccagataaacatctctccagataccggtagtaatcaaacgagggccccagtcccatccataattatatccggctttgcgagcataaaggcttaacataatatccgactgatcattattaggccatgcctgcaactggaaaggagacgccaggtacttaggcatatccaccttaaatatagaatggaaatagatgcggatagtattctcccctttcttcaaataaggaagaggattcaaagtccatgtacgaaacatattgtcacacttcatcaccagataatcattgatataaatatcggcatacgtatcaagtccggcaaaaactagctgtacattgggcgcttgaagcagagcctcatctactatgaaagtctttttatattcccaatccttttctccaatccattgcagggatttctcatttactccgtaaaacgggtcctttatcatacgattattcatcaaatcggtatgtacagctccgggcacttgtgccgggagccaactttgagatatagattgcttgaactgccattcatcattcagactgatccggcttttgtttttcgccgtaacaggtatcaaacaggtaaataacataagcaacaatatatattgaatctttttatgcataatacaaattagttaaatgataagtgattgcttaatcccggtcactctctaccagaatagtactctgaaaacgagttgcatttcccgatttcgggacaataaatgtaatcttggcaactgctgatttataactcgtgtcatcacccaacgaaggtgatatattataatttcccggtttaccgctttcttctacggctttaaagttgtcatcttcaaacgttatattcggacaagagaactcacctccccagtctttctgattatagaatttgaattgaacccatttactgacaatgacagtctgtgaatagacagtttgggtagcatcttccgatactttacggaaaataactgcattattaaaatcccaatccggattatagttccacaattccgggcgaccgattccccaaccattcacaaacaaaacttccggataggaaacattagtagttaacggattttccgcactctctacaaaaacaaagttgaacatcgtattcatatataacgtcacattacctgtctgcccgatatacatcaacttatctccttccagtttaaagaaatccggatcaaacttcaacacattgagatcaatcaattctgtcctcacttcttcaccgtttgtcaaagaaacattctgggcacgaagtgtattgcttacaaaatcattatccgacgcattcttcttatatagcatgaagacaacatcatttaccgtcatttcctttttcagaggtgaaatctcaaaagaaaaagcatcgaataccacctctctcactttctcttccgtactctgtgaatcacaaagggaaaccggacgcgacgaagccaactcgcaagtattcgtactggcatcaaatccccataccattcctttcttttccggctcgctatatataaacacatttgtattattcggcaagtctacagtagccttatataaataaggagttaacggattactttcatccctttgcagcacaatttcttcccctgtttcaccaaccactacatataattgtgcaaaatccggcctttccaatggaatctcgtaagattgttctgctgttttcacatttttatttgtagccacaacctccagagaagcaagttgctcgccacacaaacgtccgaacggcacttcgatttcttcttccactttcaatgtcttttgattatttcccggaagagttttggaataaagcaccgcctgattggcaaccaagcgtatttctacgtgcgacaaggcatctgcatccgtcacctccacgtttaattttaccgacccaccatattgcaactgttcctgattcaaggataactttccaatgacaggtgcttcggcagacggatcgaaaaacatttcatcctgattctggcaagaaacagccagtaacccgataaatatatagaatgaaacaagcttaaataaattcgttttcatatttcttcatttaaagattaataaaggaagaggattaattataccccggattttgagttaggttcggattacgatccctttcttcctgcggaataggcatcagcaacatgtgtgcggggaatttacccgtaacagtcgtttgttctccatccacaatttccgaccacgtcagacttgacagggtgctttgagcaattccataacgtttcaaatcaaagaatcgctctccttcgtaagccagttccaagcgtctttctttcaaaaggagccgggtcagttcttctcttgaactggcattcaattcctgaagtccgatacgggtacgaatcttttgcagattgggttccgctattgcagttgccggaccggacaaagcattgactgcttctgcatgcaacaaaacaatatcagccagacggaaaatatagatcaagtctccgcaatcccatcctacccgattctttgccctgcacttgtaagggaaaggcaatgtgcgggtttcccattgtccattcttcagttgcgcataatactggtcgaaccaaatattgttaatgtcctcaaagatgaccgtagagtttttacgaacctgatctccttcatcatcaaaagctttcagcaaactttgggaaggtgtcagatatttacgccaattctgctctgtcatggaaggaggcaatagaagaacaggtacgtaattattttccgtactgttggcgatatactgtacagccagaatcgtctcactattattacgatgttcatcgtcaaacagatggtcatacgtatccaccaatcggtataccggcgaattcatcactgcttccgaataggtcttcaccttatcccattctacattgccgggtgcacctttcgttgcatacacttttgcaaacaaagcgttaaccgcccctttactggcaaatcctctggtttcagcttccgtagcacgcttgtccggtaaacgggtcaacgcaaattccaaatcttcaatgatacgtgcataaacttcctcttccgaatcggcacgaggcacttgcacatcagccggagcagtgcttcccgtagtagtcacaacaggcacacatccccaggtctttactaaattaaaataatgcaacgcccgcaagaaagaagcttctccaagcatttcttcacgtttactcactccggtaaaagcttccgcgtccaacaacggatcattaatttgaggtatatatttcaaagctacgttacaacgcataatacttccgtaaagcgacttccatgatttcataacaaccgcattacggggagtcaggtcgcgtaagaacacattattgatatccacatcatcaccaccactgtatgcattatccgcaaaacagtctgcaagaatcatataataccacatataatattcttcatgccccttctgtattccgtcatagcaactgataatcagtgcttccgcatcttttatggaagtaaaagcattggcttcggtcagttctccctgcggtgtttctgtcaggaaactatcacaggaggtcagccctacattgagcagcaaagctgcggatataaatatagaatatatctgtttcatgtcttttttagatttaatgagttgaacaatgctcaaaatacaatagtagctcccagaatataagttcttgcatgggggaagacaccctggtcgattcccatagccgaagaactgcctccaccgatattcacttccgggtcataacctctgtaattggtaaaagtcaccaggttatcccctgatatatagaccgtcactctgtccatcaaagccttccgggtcagcggacgcggcaaagtatatgacagtttcacatttttcagtttaaagtaagatccgtcttctacaaaacgggaagaaatagccgggtatttatctttctccgcacggggcacagtagtgtagtctcccggattacgccaacgcatcaggacacggtcggactggttgcgggagtcgaacattccttcggtaaacatacgggtggcattataaatatcattcccgtatgaaccctgaaagaagaaagacaggtcaaaattcttatatgaaaagacattgttgatgccatacaaaaatttcggctgtgcacaacccaagatccggcggtcttcatctgcgctcaaatcttcttcatacactaacattccgttagccttttcgtacatcatacgtccgttttgcgggtttactcctgctgcctgaaaaccataaaaagaacctaaagcctgtcctttctgaatgatagacacatttccggagattttcttatcaagtgatccggtaaagatagcaggacttcctgccatatctgtcacctcattcttattagtggagatattaaaatctgttgtccattttagttctccggtcagattacgcgtggtcagttggaactccaatcctttatttaccacgctacctacattttgcatacccgaatcgaatccggaagtttgaggcagctttaccattaacagcaaatcggttgttttcttatagtatgcatcggcagtcaacgtcattcttccattaaggaaagagaagtcgagtcccacattggtctgggtagttctctcccaacgcaacttatcattccctatctggctctgataatatcctggtaaaataacgccatccatattataattggctccgattccataaatcccataagaactataataacccacctggtcattaccaacctgtccccagccgacacgcagtttcaaatcactcaaccaatccaatggtttcataaattcctccccagtcagtctccatcccaaagagaaagaagggaaatacccccaacggttgttcacgccaaacttggaagaaccgtcagcacggaaattgacagtggcgaggtacttattctggtagtcataggtcactctccccaatacagaagcattggtagatgcaccataatcttcacttggcttgtttaatacagttccggcgttcatagaatgtattttattatcagagaatccacgtatagaactgtttgccgattctcccacatagcgggaagccacaaaccccgccaaagccgagaaactgtgatctcctatcttcttagtataagtcagaatttcttcgttgatccatttgtaatttaacgaagtgttataactcgcttgtccctgctggttacgtccccaagctgaactgaacgggtccagaaattctttgtaccgggaagcacccatttcgatgcccatgcttgtttttaacttcagatccggagtaaaagaaatctccgcatagaggttacccaacaatttatgatatacataatcacgagtatatgactctaccgcacttaaaggattctccaaagaagacaaaaacggtagcgtaggaaatgttccgtccgcattatatttacctaccacagatggagtggtgatggcttgcagaataacggtctcggaatttccatccgaaacatcgacatcattgatcttactgtaacttaggttcgttccgatctttacccattttttcaattcctgttccagattgatcttaaaattcatacgttcaaatgaagatggttttacaataccatcctgtttgataaatccggctgaaatgtaataaagggatttttcgtttccaccggaaatggataactgataattctgcatggccgcattgcgaaacatttcatcctgccagtcgatattggcattatacacggaggtatccatggccggataccccaaatcggaaagtaaatcctgatattcatctttattcaaaacatctattctcttggcacgttccgaaaaaccatagtaggcattcaactcaatttgcgcttcacctttccggcctcttttggtggtaatcagtactaccccattcgcacctgcatttccgtagattgcagcagaagaagcgtctttcaataccgtaatgctttctatttcggaagggttgatcgtttttgtgtcactggtcggcactccatccaccacatacaaaggttcgtttcctgcattgatagacgtagctccccggacacggatagagaaaccctcattcggcttccccgaaggggtgataacttgtactcccgcagaacgtccggcaagtgccgacccgaaatcattcacgggaatattttctatatcttttgccagaacagtggatacagctcccgttatatctttcttcttctgtacgctatagcctactacaaccacttcatccagttttttcacatcttcctctaaagttacattcagcatccggttgtctccgattcttttttcctgggacagataaccgagaaaagagtattgaagtacttgattaggatgatcgattttgatttcgtacttaccatccatattggtcaccactccattattacttcctttcaccatcacactgacacctatcatcggttcgccggaactatccgtaacttgtcctgtcacgtttctggcagtagccccctgtgtagattctgcgtctttctgcctgacattcttggagatacggacagttttgttattgatatcgaaagagacatcctgcccccgaaacagattattcagtacatcttcgatcttttgttgtttggcgtctattgaaacttttctttttgtatcaatatccggtgttcgaagaacaaacgtgtagttgtatcgcttattgattgtttccaacgcctcaccaattgtcttatttttgagactaagcgtgataagttctccattattctgcgccaataccggattcgtccagataaatagcgccaatagaattggtaaaagattgctaaatagctctctaaaatgagccggtttttcatgatatttcatacctttggcaatgatctaagttaataattaattttgttaactgatttccaaaacgggaaagtgtcgcaaccactttctcgtttatttttttatttgtttatccatccattccgcacatgtattttaaggttaataactgggttgtctatctcgtctttcttgaaaattcaataatatcctgatctcgcttgatacataattcattgtctatattcaatgcttcgagcatctcatccaaagaaagtccctgggcaaatgtgacaaagaaaatttctttgagtagcgctttatcccttatcacaatctgaacattgaacagacgttgaagttccgttataatctcttgcagtgtcttgtctctgaatgtatactgtccgtttcgccaggattgatacccatcgacgtcaaacttttcaagtttaacttgttttttatccagtatggctttctcacccggaacaaggaaaatatcatgctgatttaaatctcccttcaccaacaaagaaatacttccttcaagcagtgtggcttccgtgcctttatcttccgtataagaacgtacattaaatcttgttccatgcactttgatgcttaaatcttttgtatctacaataaaaggacgttccggatcttttgtcacttccagaaaggtttctccgctaacaaatatctggcgaacttgggtaaaccgttcgggatagataatatgtgtaccggaattcagccagactttactctggtcgggcaaaataacttctttcttttgcccatattcggcatagacttctatccagttgacttgtgattccttgttatccagatatagataaagagtagctcccaataaaggaataaacagaatagctgcaacacgtatcagataatgtattgttctcgtgaatgtactcttttgaggagacggagctactccgccaatagcttcacagaccttcacaaatgcagaagaggtcatttcgcggtcacaggctacttgagacgattctttccaaatttcttgcaattcctgatcgaattccggtttagactcattctctatgaaccatcgtccaaacgcacttgaagtgatatccttcttcaagttatagaaatagtctttcaatattccgggaggtaagagtttcatttttcttcgtattatctggttatatctgatatacggaagctagaaaaagtacacccaatgctttttcgactttaacatttataaactattaattgggaatagaggtgtaacaaaaagtagtatggcagagcggaaaaattaaaatcagagagaaagaatgaacaaaacagcaatccaataaagaaatcctcccagtttttcacgaagtatatgcaacgctatattcagatggcgttctaccgtgcgtttggatattcctagtttagaggctatctcatcattagacaatccttgcaaacgactcatgacaaacactgcacgacgctgcggaggcatattatccacttctttcatcaccagttctttaatatgtgacagatcataaacactttctatcatttcatctgtatgatcgctatccttcagatatgaaatgctttccaaaggttctgaaatgactaaggaacggaaataatctgttatctcattctttgtgatggaatacaaatagttattaaacttccgttcgcaatcaatcaattctctttttgtccagaccttgataaatacattttgagctatatcatcggcaacaaaagaatctttcactatccccaatgtgaagaaacgcacttgagaatagtaacgatcgaaaagaagtttaaaagcatttatatctccggaaatcattcgagagataatatgactctcatttttcataaacagttagtgcaatattgcagattttattgtctcatacttcccaacatttccatcccttattagcacaaatgtacaccacatatgtccgtacattataattaggaaactttttcttagtgtcttcaccgtatcttttcacctgttccacgtgctcgggaagaggctcggaaagcgcaagcatcttttcagcttctttcatacgataatatttaaattcgaccacacgatcatccgtatagtaatctgtaccgggaataccggtcatttcaaagtctgatcggcctactgaattattctgttcgatggcaaaggtataacaactacttaaataacgcgataccagttcgtagaaagaacaccggataaagttttcattgatcttatcaaaaacttgtgctggaaattgtcccaaatattgttcgaaataattctgaacgagtggttctaagcttcgattggaatcatagtgccgatacacaggaacataacgttgtgcattgccttctattttgttcagttgattatagtagtccatgtatacactacgcatcgtcatattaggcaatgtggttacaaatttatccttcaacgtcgtcattcccaaataaaacaaactaatgggataaaactctttatcaaaaaactttttcttattaaacttactagcaagatcagccacattataaggcaattcatcgtcaattaccaatgcatccaacatcgttttcgcattatccagcgaaagagtcaaccgacgaatccaatgaatgtcagtacgtagattttcatctaccaattcgtccggaatactaccggcattggctgcaaatttcttgaagaagtaagtaaggatagtggcattgaataaccgatctccattcggacggaaacgataaccatcatagttactcactattagttgccatatttcgtcaaagcgatcctgtcctgtagaatacttatcaagcacataacgtagatatgtttcagtttcttcgtatgtaaacccaagcatattcaggaaattaggctcaagagtcaatatctctgcaatattatatccactagtcaaatcatccatagtgacaggcagcacacctgtacaaaaacaagtacggatactaccttcaccaataccttttttaattactttaaaaaaagtacgcagaaagctgtcattagtagtaacttcttcatagagtggatcattataggcagtaagtaattgattggtgaaattatcatattcatcaatcaaaatatagactttaggcaattcgtgagagcgggcgtaagtaagcacttcttccagcattttagatgcatcgccacgattgctaaattcaaaatcaccaaacaaatcacgattatgtgctaccattacttctaccggaccgcaattcaggtcattaaaattctgtgccagcccttgaatatggtctgacattaccattgcggagaagtcataacgaattatcatataacggttatgttcttttgtcggatggtttccaatccacgtgtcaccaaacaattcttcaaaccgatgcgctttcgtacggtcataatagcaagctagagtagagactaacaaactcttcccaaagcgacggggacgcagaaatacaggagccttataatcttcaagcttagctatatattgggtcttatctacgtaatagaaaccacgttcacgcatttctatgaaatctgctactgcataaggaattgttatacttgccataatcctactgttttttctatagacaaacaaaggtacaaaattgttagcaataacaagaagaaatctttgaattgattgttattactcttgttgccaaacataaaacacggttcttccagttccacgtttacgaagaatccctttctcaatgaaagtattcaaatcatctattgctttcagtcgggaaagtccggtcaggctactatattccaatcgggtaataccaccatttttccttagaaattcctgtaaaagctgttggcgttgctccatagaaaattccactttttgagaagagtgtttggatttgtccacacgttccaactctatctcacgcttaatcttccttttgaactctttggaagtacgcaaatgcacgttatcaaaacagattgattcggcacgaatctcccgtttagtcattactttatgcgtacatttcaaagagatgctaaaatgcccgagttcgccaagttctacgatatatccctctgctaacgtttcggctagttcatccaatacaactcctaccaccgcatctatcacgttatagttaaaagtctgggaagaacgagatacacgttccaggaattcttttttcgagtaagttccatttggaacgatacgggcatgcaaaggcttttgttctccggtacaatcaggatccggtgtttcatacaaatcatattgagcactcataagtatatctttttattagttcatacatttattactttcactacgtatatttaatcgcctgttcattgaactttaatcttcagttcatataaaaataatcgtctgacagctgtatctttttcgtctgacagttgtcagacggaaagataacagttgtcagacgaaagttcaacagctgtcagacgattaatctatcgcatacaaaggtataactttatgcgatgcgacctttaaatcttaggaggaaaaagacaattcctcccaagaatttaatcacccaacagtaatttagtcacagcggcagtattcaatgcccattcacgggtatatatctcgtccgcttccggaatatcaactaacttcaatccctgcgcctgtgctttgacagctaacagttcaccaacagttgttttcgcttccagcttatccagatacttttcgatggtctgtgtatccaaagaaagaatcgtctgtccaccaaaaggtatttccagccaaacaatttcccgttctttcactttcagaactccgaaaacaagccctttctgcaaactttgggaaatacgtacctgatgttgcacgcaagaaggatcgtaagctactcctgttctttccgatatcttcattggataggcagagttcatccaacctaccaccagattaggagagatagtcccgttgctatatgcattgcaagtgaaagcgacatattccgcacctacacggttcagttcattcaaatccagctcgatatattcggcagtacctttcttattaggaatacttcggatatccccgctatgtttagcgccaatagcttgcaagttgaagaaggaacaaacttctgttgtggaaggcaaagtgatatgacaactcaagtccatatcaagatgctgtgccggaagcccttttccccactgcataaacaatcgcactttatctccctctaccgggaaacgcgttccctgcaaagcacaggaagtatcctgaattgtttcgctacgatcgccgatagccaacgggatatggaacaacatagggtcaatatacatacttttgttttcactttcgacagttgcactggcgaaacgggcagctacgacttccttacacaaatcctgtacatccttcaccatcgcttttagctgatcctccatatacagccccaccaaataatgtggttctatcaaaagagcattcccccctaaaggtttcaccattctcttacgtcccggttcaaagtagctctccgcatacatacccaaagtaacgaccaaacgtgctggcaacaaatgaaccacttctttaaatacagccaacgtctcttccgctccgaaccaaagcatattcgcaaataaagaacgtgcaaacatacccggtcgctgctttaacaaagcaaatgtctgttccgcatccgccttcaaacggttgcgctccacttctccctgccaaacggtatatgcctcgcggtagaatatatccatcaattccttcaaatttccgaattccggcttacgggcatattccgccagacgcaacgcacgtatcatacgtacccacatctctcttttcggatgcatgatttcgcaagccttctccggagccattgtcaggttgttcaaccaaagagctaccattttacattcacgacgcgtatatttcaacttcaactcctcacgcttcgcttgagctgccgaacgacttttatccaaaactccacatatatgtgtgttgtttctacctgttttacggataatagtcttaggctctatgatttgcaggaatccggttttcttataccacagataacgcaatatatcattcggagtagagaaatagatttgcgcttcctgcgctctatcctgttccaccaatgtatctatcaccaacatcaatgtctccttcattttgattccgactgccggtaacggaagttcgccaagcattattttcaagctatccgcttgtgtggcatcaagagccgtgcgcgattcaagcaagtcacagaaaaaagcattcaactccttgtcctgccaaagttccagcactttcagtttacttccctgtccgaaatattccgtagtagccgtttggaacggggttccgcagaacggacaaccattgtatcgttccatagggaatgtattatcagggatcacgtgtccgcaaggtagtttaacgcctttctggctattaaacaggttagcgatccatgtaaccagatgatccaagcgcgtttctccggtaggtacatcccaccctttcaccaatggagaccagtttagcgtcacgcccaatgcttctttcatcacctgaagaatcatcatctgttgagccggatataactgattaatggcatgcagcagttcttcggacaagctatatcctactttacggagttgggctaccaatgcaatggtagtcgaagtcaactcttcctgctttttctcttcttctatcaaaggcaaatagattgcattctgcctgatagacactttcaacaaatctttattcataactttgtttttttaagtaaggtaatcggaagactgtgaatcaatggagcattcctgcggttttgaagtaagtcttccttgaccttagttgataaaaagaggtagaacaggccggattcgaaccagcgttatccaccgttaagaagtaagccccggttgacctcatttcagataatcccgaagctgctgtcctacctctatatttattttttgtggagcaggccggagtcgaaccgacgaccgtcacaggatagaagtaaatcttaattgacctttttcatcaggataatctcaagattatgtatgatgctctacccactgagctactgcccctttacgaaacaggaaaactgataatcgtatgagtcaatatcttaacaggatgtatggaagtaacccgtacttgacctgttttcttgtttcttcgacaaagatagatgcagtggtgcgcagcctttttgcgcaactaaaacttttttgctcttttaaagaaaaaaataaattccaatacctgcatcgtttaaatagaaatcagcgatttgccttacgattctttacttcttctacaagttttgtaaaggacttctcctttttacgtttctcatgttcggaagctgaaaagtgccacgcttcccggcgaagtttcagatagcttgcataaactttataatctaacacaccgctattgactgcttctaaaacagcacaacccggttcgttgatatgcttgcaatctttgaaacggcacgattctgcatagtcagagatttcaagtacttcggccagtgagtctggattgtcgataaccaagccaaattcacgcacacccggagtatcgattaaaacacccgaatcattcatcaataccatttcccgacgggttgatgtatgccggccttttcctgtggacaggcttatatcggaggtaagcaacacagatttttcacagagtgcatttaccagagaacttttcccgacacccgaagaaccgacaaacacaacagtttctccctctgatatggattcccgcaaccggagaatcgtttggggttgatgaatgctcgtaaaaaatacgggtatctgattggagatatgatttatttgttcttcaacactctgcctgtcaaaatctaaatcggatttattaagtaccaatacaggcttgatgttttcttctaatacctgaaccataaaacgttctactctgcggacattgaaattatcgtcaaggctctgcacaataaatgctttatcgacgtaagaagcaatggcctgcttatcggcaactgtaccgcttttcttgcgatacaatgtccgctcacgaggtagcatatcgacaataatccctttattctcatcaaatggttgaaaaagcacccaatcacccgtacagggtaattcagcatcagatttcccatacatcatgtttcccgtgagttcacactgaaacaatccgttttcggaaacgacctcgtagcaggtacgatgtactatggatatacgtccatgaggaagagtgctgtagagtgattcttgttttagttggcttagtttatcattccagccataccagtttaaattaaagtcgaatttgtgaattgtttgattttcgttattcatgatcttaatgtatacagcgtacacgttacaaagcaccacgatacttttagcacccttgtacgcaagttaaaaattgaaattataaagacataaagagtactcccggaaggaatcatccgagagcaaacgaaaggacaatctgtatcagaaacacagattgtttactaaaccaaatccgatttattatttcttgtcatgcgacaaagatagactatttttatttaatggcaaaacgagccgtcatttcataccgtagcttgataacccggtactgctcggtagctgccgcacccatgcttacattgctctgcgcttcgaaaggaagataacggcttatgttattatcggcaggttcgatgatacgaatcacttcacccaactgctgccccatcgcttccaccagataagatgctttctcacgggcagccttcagtgcttcaatcttaccttgtttccgatacattggcaaatccttatgtttgagttctccgatgcgcatggactcaattccccacgtattgactgaacgaataatagagttaatctgctcaaaatccgtaagccggatatccaattgcttacctatcagaaactcctttcctctctgacgccaataatctcctatttcctgtgtgcggatagcatcatccgttattcctattttgcgcaaacttttacgcaaatctttctctatcattgccaatggcactttcgtatgaaaatcttcttctttttttgatttaccggtgtattcttcttgccaatactccttaatctgaaccagaaaatgaatctcatccggaacgacttctatttcagaagaaccggtcacttcaacgtatcgtccatcactttcctgtgcattcacaacgatactccaagtaaacaaaacaaaagctaataaacatacctttttcatatcttcaatcttaatagtacaacctcttttacagaatgcgaattatcatttcacaaagctattaaaaaaaactgtaaaaccgattttatcccaagaaatcaatcaggctttttcgatccatcaaaatagtatcgccattctttaccttacacttggaagatgttttgccggaaagtaaagaaatataccctttttcaaacagcagcttcaagcgggtactggaaaaaggcagacatctttttatcaatgaggataatttaaggctcaagtcgaaatcacacttgacttggatacttatgatctcactactcatattcaggatgtcttctaaagagacggtatttatcacctcatattcaacactgtcataatctaattgaagattattcctacttgccactccggcagaaaaggcatattgccaggcaacttccctgtcattcatagaaaagctgtgaaagagctttttatcaatcaagtcgggtttagttcgtgacaacagagtcatattacaagtgttatcacatttcacacatctataaatcagccagacatcaatgtttttcttctgtgcattcatcctgaacttatcactgcaataaaagcggtcactatcacagtgactgcatttcttaattaataaggggcaattcttcacccttatctcccatgtaaatgttgtttccataactatacaaaagcgattatctttctttgtgaatcaattatatttctccgcaaagttggataatagccatttgtataattcacaagatgtcacaagacgccctgaaatttatctgtcaagctcatccatcatctttataatctgttctttcaacttatccagaaattgggttctgcttttctttctattcctgatttccaagaatatacgataaaaatcacctatctcgatattaaacagtgtttcgcaacaaaaagcaatgtctttcaaactcgtatttccattactaaagcatttacctgcatacaaggcgtagataaactcaaccaaagcaactttactgtccgtccattgcaacagtttactgtctacaatggaagtgaatttaagatgaagtttctctgtcagctgctctatttcctccgacacatattctatcaagcgattattcgccagaatttctgcaacactcgaatcatgcaaggtggtaaaagaaatatctctatccagtagatgacaatgtatatcagaaagaatatcataattctcccgaataaaatagcggttatcaagctctgttcgaccggcacggtaatattcataaaagtcattattcaaaaatgatttttgcaggttctccaattcaatcttcagatatctgcattgggatgacagagatttgtcgatacgattcttttcaatctgatacaaacggacataaaacatcaacagaccggaaatctgcggtttcgagactttaaagaaaagaatctcttcttcagcacttcgaaactgatatccgacaacagttgttttcagcgaagtcagcgaaacctgtacgacaccaatgatctgcctgattctatccaaaggatcaaccggctgcagctcaatcctttttatttcttcttctatgttcagcttactatttcttacgaaattttccattcattctcaacgcacccaccactcccatctgattagcataaaccggactaaaagcctgaataccttaattgcatcagttttgaaaaacgatgcagtgaataataaaaatgataaaatgaaaaacctgttcaagtatagaactactcaaacgaaagaaattagcctgtggtttatgaggctaatattaagctataacaaatttaagaattgtgcccaaaatcattgcttttagaattcagatgcaaataaaattgttttattaggatgacatgaagtttatatgaatttttgaaataaactcaccagaagtatagaaaaatagtaactttgcctccgacttttcacagatactgtgagaaagcaattcttttaattatataaataaaaaagactatgatcagattaaatgtttttgttcgtgtaaacgaatccaaccgcgaagaaacaataaaagcggcaaaagaactgactgcctgttctttaaaagaagaaggatgcattgcttatgatactttcgaaagcagcacgcgtcctgacgttttcatgatttgcgaaacttggcagaatgccgaagtattggcagcacacgaaaaatctcctcatttcgctcaatatgtaggtatcattcagaaattggctgaaatgaaattggaaaaatttgaattctaaatgaattacgaggctgttcgagaacagcctcattaaatccgctattcctctatctttccgagtagaattagtcgagtttcttatggataaatattccttcaatccaataagttgcgtgattcgattcaaatttcaacaagacatagccgggatcagtgggaccaccgggaaaatgatcgataaaccaatcctgccaaagttcctgcttcatcttttcgtcagttacaacttccactttccccgttaacgccacgctgtctcctttatcctgaaagcataatcctgctttcggattcgataagaaatcaattgtttttagtgaatctgctccggtagacatccagatagtggaaattccttctgtcaggattttgctcatcggtacagggcggggataaccttctttattcacagaagcaagggtaactacttcacatctctgcaacaattctgttgctttctctttcattgtttttgtggtcataaattgattgttttttattaaccttgcaaaggtaacggcatatcttcccattctattgtaaaaaagcgacttttacctaatctatctttgtggttcgatataagtaagtgtggtttcttccggaacggttagggaaagaaaagacgcaggagtattgccggacatcgacttaatctcttttgaaaaatgcgctaaatcatagtatcctgcatcaactgccgtagtcaacagattggctgatgttgtggttctcaacaattccacagcattcttaaatttaacaatacggctgtattctttaggagtaaatccggtataatgcttgaactttctctcaaaatgacgctgacacaaacagacatcatccatcaagctgcgaactgaacgttttcctttggaatgattaatcatgttcactgccatagcgacatgagaatcggcaggctgataatgacgcgccaaatatgccagcaaatattcttccactactcgtattcgatctgtgacatgcttctgctcacctaatttttcaataaaagtgtcatcaaaaacagccttcatctcattagtactgactctgctattcacaaattcgtgtagaggcaggtttgtaaagcaagacaaaccacaaggtaaaaaacgaacgccaaacatgtgaatcgattctgtataagtgacgagttccgaatattttgtcataggtcctacaaaataggaacgatagggttgcataatcagactcccttcttcaacagcattagccacctctcccagcgtaaatataaaatcggtacaaccatccggcagaatatggatgcgcataccataatccggattgcccttaaactcccaatagctatcaatgtagggaacaagtaaatgagaaggctgatattctgtatacatggatctattttgtacgcaaatatagcgaaaataaattctaatcaatgatgcgtccgtttgcctttgccttttgaagccattcagggacaatctcttcgagaaatttatctttgcctaccttttcggcagccatatccaaaccgatatattgctgcgccttttctttcgttgtgatatccggaagcggaacatcaccagtatatccgtacgttcaatttgaaggggtcactttcagctggacaaaagggatcaatttagattggattcaggggatcaatttgatttggacaggagggggcaaatggtcccggattttccattttgtccatgcctttggtttatgtcgaacaaaaatagtgtaaattctttaaaagaagagttttttattggaaatgtttccccaaagtccattttaattcaatttttagtaaaaggtttctatttgccaatcctgttactatattttctccaacctcattttttatgctatatttgtatccgaaaaaataatagaaacgatgataaactttgcagctatcgactttgaaacagccaacggcaaacgtaccagcgtatgcagtgttggggttgtcatcgtaagggaaggaaaaataacgaataaaatctatcgtctgatccgtccccgccccaattattatacgcaatggaccacagctgttcatggcttaacttacgacgacacgatggaagccgacgaatttccggaagtatgggcggaaatcaaaccattgatagacggtctgccacttgtagcgcacaacagtccttttgatgaaggttgtctccgggcggttcacgaattatatgacatgacttatcctgattataagttttattgtacttgccgtacttcgaggaaagtctttggaaaagatttgcccaatcatcagttgcatacggtagcagaacgatgcggatatcatttagagaatcaccaccacgcactggcagatgcagaggcttgcgcacaaatagctttacttattattcccgaaccgaaaaaagaaagaaaaacaaagaaagctgataaagatatacatgttggagatttattcgcttcacttattcctcaaccagtgaaaaagagcaaatgaaaaacactacaactattatttcaatcaataatagccgtagtgtttgataataaagtgctaactatgtacttcgattagaggatagattttgcaatacccatttccaagccgcgaagttctgccaagccgcgaagacggcccaggcaagaatatcccggattcgttttctttttcaagtcatcaatcatttgatgtccgtggtcgggacgcatagcgatagagcatttacgacgctgttgtagaagaataaggctcttcattacgttgtacatgtctacatttccttccaagtgattagcttcgtagaagtttccttcctcgtcacgttgtgtactgcgcaagtgtacgaagttcacacggtcgccaaaacgctccatcatacctgcaagatcattgtcggcacgcacaccgaaagagcctgtacacaagcagaggccattagattcgttaggtacggcttcaatcaatttcttgaaatcctcttccgtactcaaaatacgaggcaaacctaagatggtataaggaggatcatccggatgaatcaccagtttcactcctacttcatcggcaacaggagcaatttcttttaagaaaaaaatcaggttggaacgaagcttctctgcatcaatatcgtcataacgatctaatgcttgctgaaattgttctactgtgaaactttcttccgaacccggaagtccggcaatcatattacgaaccaacaatttcttgtcgtcttcgctcatctgctcaaaacgagctttcgctttagctatttcttccggagtatagtctttttcagcattcggacgtttcaagatgaaaagatcgaaagctacaaaagctgctttttcaaagcggagtgctttagagccgtccggcattgtataggcaagatctgtgcgggtccagtccaatacaggcatgaagttataagtaactaccatcacgccacacttcgccagattacggatactttccttatagttttcgatgtatttcataaagtcgcccgtctgtgttttgatatgctcgtgtacaggtacactttctaccacagaccatgtcagacccacttcttcaatcatttgcttacgcttcatgatctcttctactgtccacacttcaccatttggaatgtgatgaagagcatttactataccagtagcgcctgcctgcttaatatcccacaagctaaccgggtcattaggaccataccagcgccaagtttgttcacataaatacatattattctttcctgattacaagttactaattatgattaaaaacagaatgatatcatcccaatattagatagagaatgcatcaaatccaccgtcgataacagctactgtacctgttacgaagttagaagcatcgctaatcaaataatggattgttccataaaggtcttccggttcaccgaaacggttgaatggagtatgagcgagaatggtctttgaacgatcggtcagagaaccatccggattagtcaataatgcacgattctgatcggtcaggaagaatcccggagcgatggcatttacacgcagaccgttaccgaatttcaaagccagttcgccagccatatatttagtaaagttggcaatagctgcttttgccgcaccataacctaccacacgggtcaatggacgaagagccgattcagaacagaagtttacaatagaacctttcttctgttctaccataatttcagcaaataccattgtaggcaatactgtaccgaaaaggttcaaatccactactttcttgaatgcgtcaatctgtaaatcgaaaaaagttttatccggagcaatagttgcacctgccatgttacctccggcagcgttcaacaaaacatcaatacggccataagccttcatgatttccactttgttgccttccaacacttctttatccatcacatccgtgtaaaggaacatagcttcatttccttcggctttgatactgtctaccaatgcttttcctgcttcttcacttctgtcgagcacaactacttttgcaccttcctttgcgagatacgcagcaatacctttacctaaaataccagctccaccggtgataacaactactttgccttttacgttaaataattcattcatagttcttacaaatttatatgtttataatttattgttcagataatatttcagattctctttgagaagaatatcgataggcatcaaattaaccttctcactgccctgtttgaacaacagatgattacacaatgatttaataccatcatatccctgacgctccggacgctgcgcaatcaatgcggttatgacaccttcggaaagcaactgtgtatttctcccgataagatcataaccaaccagtttaacagactgcattcctctcgctttcaggtaattccctaaaatataacaagttgaattgaagataacagccccatttatatttggattagcttcaaatatttcatccagtttcatgaagttatacactgaatcatttattttcagctccacttcatgcagatttccattgaatcctgtttgcgtgagataatggcagaaaccttcccgcctgttctttccctgattagagtcattcttcccactatgaataattcgcgccatcaatatatcggaagacgaagaaagccgatccatcaacaatctggcagcaatcactccggcatcataagactccgttccgaaataagccagttgatgttgccctccaatgttggagtcaacatacacataaggtatttcattcctgtcaagttcctgcgaaagccggataacagaatccgtaaacaaagtcgcaatcaatacaccatctactttctcattcagcagattacggatgatatcatcaaaagtcttgttattatattgatcgaaaaagagtttggtaatggtgatgttatacgattccatttccgacgctgctttatctataccttccgaaatagcttcccaatactctccctgaacaaaagaaggagtaatcgcaagaagatgatattgctttttggaggccgccaatgaacgtgccatcagattgggctggtaatgtaccatctccagaatcgcctgtacctttttcctgttttcttcagataccctgccacgattatgtattacacgatctaccgtgccaacagagactcctgccatcttggcaatgtctacaatccgaatatttgaaaactctttatccatctattgataagtatcttgtttttcatcggcaaaagtaaaatgaattattgaattaagcaatagtgtgtgcgcgcacacacaacacataataaagaacagactactaataatcagcaagttaaccacagcagcaaggaagtatacatgttgttaaacataagaaaaagtaaagatagtatagataaaaaagtacttatcagatgagaaaccagaggaaaagtagcttttgattcttgaaggaagtgaaaataatggagaagatacaccaatatgtgttcgtgcacacatcattcaaatagtgactgataaggctagaaataaaagattaaacgtatataaaataaaacaggtaaccgattctatttaaatcgattacccgttttggaattcttattttccccacttatcttttacttttccggccactttatcggcttcatctgctactttatcagcaatttccgcaccggcttctactgctttaagtccaagatccactgcttttctttcagcatgagcagcagctatttcagcatcacgacctatgcgatggatagcattataaatttcactttctaattgttttgcttttgctgtacgtgaaagacgataagctactgcgccaaggattgacccaattccgagtccaatccagaaatttccatgtctacattccataatcaagttctgtttttaggattaaaaataaattatataaatatctatttagatttcgagaataaagaagcaatccacaatacaaggatagctcctacggtggaagttatcaaacttccgatcagtcctgaagctgccagtccgaaaagggcaaacacccaaccgcccagtacacctccaagaataccaagtaataaatttataacaagaccaaaacctccgccgcgcattattttacctgcgaggaatccagccacaataccaataacgatataccatataaagcccatataatcctccttttttatttaacaacagtaggtatgaagaatagttcagtcactcaaaactgaattaacgacaatttacaatccttagtcttagagctttattcctatcatattgaattaatcacagcaaatatatattgagaaacgggaagtttccgtacctttgcagccgatttttcaggaacacttcaatagtaaataggtattatggtacagaatcaggaacaacccgtaggaaaaattacattttccattttgattgcattgagtctttcgcattgcctcaacgatcttttacagtcggtgctatcagcatcttatcctttatttaaagatgatttaggacttagtttcgcgcaaatcggacttatcacactagtctatcaactttccgcttcagtttttcaaccgattaccggaattttctttgataagcatcccgtcgcgtggtcattgcctatcggaatgagctttacactgattggtttgataaacttagcattctctgataatctatactggatattagcctccgtattcttaatcggaattggctcttccgtactgcatccggaagcctcccgtatcacgttccttgcctccggcggaaaacgtggactggcacaatcactctttcaggtaggtggtaacttcggaggttcattaggccctttgctggttgctctgttggtggctccttatggcaggcaacatctcatcgtatttgcatttgtggctttagctgctatcggagtgatgtacccaatttgcaaatggtataaatcatatctaaaccggatgaaagcacagaccgtcagtgtcagaaaaacagttcatcttcctttgcctatggataagacagccctttcaatcgcgatattgctgattctgattttctccaagtacatttatatggcaagtcttaccagttattataccttctatttgatccataaattcaatgtaagcgtacaagattcgcaactatatttatttatctttctggtagctactgctatcggaacattaattggtggacctgtcggtgaccgaattggtcggaagtatgtgatctgggcttctattttgggagctgccccattcagtttactaatgccacatgctaatttgatgtggactattatccttagcttctgtgtgggattgatgctttcttccgcttttcccgccatattgctttatgcacaggaattgcttcctaccaagctcggattaatatcagggttattttttggatttgcattcggggtggctggtgtagcatctgccgtactcggtaatttagcggataaaacgagtattgaatatgtatataatatctgtgcttatatgccgctactaggattggtcacattctttttaccgaatttgaagaagaaaaaaatagaataagattagattaaataaaatggggtgtgtcacattttgcgctccctcttttccaaagaaaacgaccggtatgcatcgtcacgacgtataccggtctacaagttaaggtcaaagtcaaaaaattaagagagctatttatatgttagggttagcgttaatttctttctgtggaatagcatataaataataggtgctatttactgtaaacggtttaccgttcgggaagttgaggaaccaatgtcccagaggatttcgtttttcaaagctaccaccctcctgccagcaatcgacttctgtcttttgcatctcatccgataaagcagcacgttctactgccttttgtgtacgaagtatatcggtaataccaaatccttctccccaaagttcacggcgacgttccatcagaatctcattgattacatcttcctgtgattttcctgtcacctcataatcccctactccacgggcattacgcaatgtattcaatggagctacagcctgtgccaacgctacaccatcacgaactttcgcctccgcttctatcaaatacatttcagcagcacgcatcaagaccagatcagccgtatcatctgcacgcatgtgaaatttcttatatcccaaatatccttcacgcatccactgaaacaaaggtaaacgaatatcaccttcggtaaatgtatctttcagatggggatcagccataaagctgctatatgctcctacgtatgttgcatccaaataatagaaattatagctggcatccgattgggaaggaatttgaggaaatccccatatccattctttattggaaatattattaaaaccttcatactcggctgtagttgtcatcaacgtatatcctgcacgtgctgcttcagcagctttcgcagcttcttcccactgtcctgtcagcaagtaagcacgagccaaaagaccgttgactactgctacatttggtttgaacttttgattatcaccgctgcggacatagtttttcaaatagtccttcgccaaagtgaggtcgtcgaaaataagctgataaacctgtgccactgttgattttcctttcggtacagtggagctattgctaggttcggtatatataggaacacacgaagcatctttatctttcaagtaggtgaattgataatgctgtaccaagtgcaaataacaaaaggcgcgtaatgccaatgcttgtccctgtgcctgacggagttcttccgaatcccccttgatagaaatggcagtgttacaattatctatcgttttatatatcagataccaggcaaactctgttctaccatttgaggattgcgctatatcattaaactgatacgaagagttaaaaccatatttcggacgggaaacaatatcacttgccatcatatcatccagacactgaagtgcccgataaccgatattggcataggtacttgaataatcaaacagattataccaggcaccattcacaagtgcctccgcattttcgggtacagataccttatccgaacttaccgcatctgtggggtccgtatccaaaaaactgctgctacaactcgttgccaggaaaagtccggcaactgccgcaagaatggattgaatttttatttttctcataatttagtctgaatttagaaagaaacattgatacctccggagatggttctcatagccggataacggtaataagtgataccggtaattccctgttcagggtctagtccctgattccggtgaatggtaaacagattatctccttgtacatatacctgcacactgctcaatgacaacttactaatccattgtttgggtaagttataggaaagtgtcaggtttttcaatcgcatatacgaattattctgcaagaagcgagtggaagccgagttccagttattagaggtagtactcaaagcagggacatcggtatagcgattgtcgggagtccatcttcttagaatctccgtcgaccagtcgcgaccttccaaacttccattgtgcagaatcattgtaacatcacgattgtagatatatccgccgatactgtaagcaaagatagccgaaagatcgaatcctttccaagaaagagacgtattgaatccgccatacaccttcggaagagacgatttgtcaacataataatagtcagccgaaccataatcatttgttgtgacacgttttccggtcggattcttatttgcatccacctcatccttataccacagcggatctccgttttcaggatctatccccgcccactctatcatatagaaatcatacaccgaacgacctacctgcaacttgttcacaccacttcgcggcatatctttcaatgggaggtctgtcaccttattcttataatgcgtcaagttcatacccagtttccatacccaaccattctgattgataatcgttccgttaagtaccatttctatacctgtattcttcaaggctcctacattttcgtcaatagaaccgtatcccagggaaggagctatcggacgtgaataaagcaggtctttcgaacgacgtgtaaagaaatcaaacgaaccggaaaaacggttattgaacagggagaagtcgatacctacattaaagttgaggtttgtttcccatttcagattcggagttgccatacggtcggacactaacgcattttctcccaaattggaaacaatagtataaagtcctttacttgcataataagtacctaggttgtcatttccctgcgcaccatagctcattttcagagtcaaggcagacaaccagtcggaagtacttgccataaactcttcccggtcgatacgccaagaagtacccaacgaccagaaatttccccagcgggtctccggcgcaaaacgtgaagaaccgtcgcgacgataggatgccgagaagaaatatttattttgatagtcgtataatgcttgagtcagataacccaccaacgcataatcgatgcgataccccgaacctccggtcaactgcgaaccgactaccagttccggcatatcaggctgcgccattttggaacgtgatgctgtcagttcatcataacggtaagaataggcttccacaccggcaaggacattaaaatgatgttcaccgattgtcttgtcatacgtagcaatattattccatgtccaagagaaagtacgggtattcattcggctgacgccgccgccgttttctttagccgggcccaattgggggttcgtataatccaacgtattataattaatcaagtcaaagttaaaactagtcttgaatttcaatccctcaataatcgtagcttccagaaaagtacgaccggaaacttcatctttcattcgttctgatttgtctaaaggcaaagtagccggcagattccagtttgccatcgaaccggaaggacgataagagccgaagtcataaatgcggtctccattctcatccaatttgtaactaccgtcggtattcatttcataaatcggataaaatcccggcatggtacgccctgcggtaatcacgttactggttttagagtcggaagaaaccggatagttctgcatagaatgtgcaaaactcaaattgactcctcccttcaaccaggaggtcatttcgctggtgatattggaacgaagattgaaacgctgataaccggattcaagcgcaatacctttatcattcaggtatccggctgaaaagaaatactgatttgcttttccgcctccggaaacacttagattcaactctgtgcgaagtgcttgttgttccatggcgtcactccagtctgaattccataatggacgggcatctgccaccaattttccatctgtaccgaccggttgcgcatattggggaccgtatggattcggtccacctcccatcaatttcgtaaccaggtctttggatgcttgtgccgcagcagttgccggagtataatccgcgctcttggcgtactgattgcgaagtgcttcccaatacaattcaaagtattgatcggtactgacacgatcataatcacgcacggcacgattggaacctcctaaagaggcttttacctttacggtcgctttggtattttgatctccttgcttggttgtgataataatcaccccatttgcgccacgtgaaccgtataaagcagcagaagccgcatctttcaatactgtcatcgaagatatatcatcaggattgatagagttcacactaccatcgaacgggacaccgtccactacataaagcggagcgctggaagcgttgatagacccgataccacgaatacggatttccgcatccgtacccggctggccgcttgccgcacttgcctgtactccggataccgtaccctctaatacacgtgatatgctggaagtctgtaacttttcaatctcaccagctttcatcgtcgaagctgctccggtaaaactatacttcttagcggtagcataagctactaccattacttcttccagttccttactttccgattccaacgtgacattaatcacactccggttattcaccggttgttctactgttctcattcctacaaaacggaacactaaagtaccggtagcaggaacctcaatcgaatactttccatcaatattggtaatggtgccggaagatgctcctttcaattgtacggagacaccaggcaaaggttctccttcagaagtcaccgtgcctgtcacgcgtttctcctgctgtgcttccgcatatactatatttcctgcaaaaagcagaagagacacgactaataaacgtaaatagattctcataattttgtggcttaagatttatttgcttgttgtaactaacagtatattgaacttttttgtttaggaaacgaaacattttttagaagattgctagtataaatcaacgaaaggtagtacattcgtgaaacgaaaaatatctataccaacaaagaaccacatggggaaacgggttattctatatctttttctgttattttcactgtccttacaggcgcagactgaagagaaagtctctttaggcaacgatagtacagaagtagattccacagcaaccgccaagccaagtgcttttaaaagagcgatcaagaagtttatgaacttcagtgatttcgatacgctctatatcagtcccaaccgttataactatgcgctgatggttactcatttcagcaactttgagtattattctatcaccagtgaattgccgcagccacagaaacttagtttttctcccaacccgcacaacaagataggattgtatttcggctggcgatggattttcctgggatggtctgtagatgtgaacgatattttcaaaaaaggtacccgaaagaacagaggaacagaattcgatcttagcctatacagctccaaactgggtgtggatatcttctatcgtcgcactggcaatgattacaaaatacataaaatcagaggattttcagacgatatcccctccaactattccgaagatttcagcggaataaaggtagatatcaaaggactgaatctatattatatcttcaataaccgcaaattctcctatcctgccgcattcagtcaatccaccaatcaacgacgcaatgcaggtacatttattgcaggtttttccatttcaaagcatcatctcgacttcgactatacagcacttccgggatttatccaggaagcgatgaatcctgccatgaaagtcaagaatattaaatacaccaatgccaacatcagtttcggctacgcctacaattgggtctttgcccgcaactgcctggcatgtctgtctctcacccctgccattgcctacaaagcttccgatgtggacgcagaaacaaatgaagcaaaagcatggtacggtaaattcaatctggattttctgattcgggcagggattgtctacaacacaggcaagtattacgtaggtacttcttttgttggaaaaaactacaattatcatcgcaacaatttctctgtcgacaatggattcggtactctccaaatatatgccggattcaacttcaacacccgcaaagaatacaggaaaaagaaataattccacagaaactagaaatcatcaacttgcttgcttatccaaagaatctttgtacatttgccacgttctaacgaacaaaagtaaaaaaatcaatgaagcaacaacgccacatacagaccacacgcgctcttctttcccgctttcgctactggggaagaaagaactatgctgcctttgcaagtatgggacgcgaattccaaatcggtcatctgcataccaatgtagtagacgttgctcttcgtaagcagaatgctgcacaaactatcccttatcatacatttatgacacttcaggaaatcaaagaccaagtgttggcgggtatcgacatatcacccgaccaagctgcttggctagccaacatggctgacagcgaggcgctttatgccgccgcgcatgagattaccgtcgcgcgtgcttcacacgagttcgacatgtgttccatcatcaacgccaagtccggccgatgtccggaaaactgcaaatggtgtgcacaatcctcccactaccggactaaagccgagatttacgatctccttcccgctgaagaatgtcttcgacaggcccaatacaatgaagcccaggacgtcaaccgattctccctcgttaccagcggacgaaaaccatctcccaaacagattacccaactttgcgatacagtccgttatatgcgtcgacattcgtcgattcaactttgtgcttctctgggactgctcaatgaagaagaattgcgttccctgcatgaagcaggaatcacccgttatcactgtaatctggaaactgccccgtcttatttttccaaactctgctctacgcatacgcaagaacagaaactggctactctcgatgcagcccgtcgtgtaggcatggatatctgttgcggaggtatcatcggcatgggagaaacgatggaacaacggattgaatttgctttcacattggcagaactgaatgttcaatccatacctatcaacctgcttagcccgattccgggaactccactggaaaatgagcagcctttaagcgaagaagaaatactcaaaaccatcgttatctttcgttttatcaatccaaccgcttttctgcgttttgccggaggacgttcacagctttcttccgaagcgatgcgcaaggcattatatatcggaattaactcggctatcgtaggcgacctattgacaacactcggctccaaagtatcggaagacaaaaagatgattcaagaagaaggttatcatttcgccggttcccagtttgaccgcgaacatatctggcatccgtacacttcgactaccgatccgcttcctgtctacaaagtgaaacgggcagacggagcaaccattaccctcgaagacggacggacactcattgacggaatgtcttcctggtggtgtgcagtgcatggatataatcatccggtattaaatcaggcggcaaaagaacaattagataaaatgtctcatgtcatgttcggaggactgacgcatgatccggccattgaactggggaaactattattgcctttggttccttcctccatgcagaaaatattctatgcagattccggttcggtagccgtagaagtggcactgaaaatggctgtacaatattggtatgccgcaggaaaaccggaaaagaacaatttcgtggctatccgttccggctatcacggtgatacgtggaatgccatgtctgtatgtgatccggtgacgggtatgcacagtcttttcggttcggcattgcctgtacgttattttgtcccgtcccccacttcccggttcgacggagaatggaatccgaaagatatactacctctacaagagatgattgaaaaacattcaaaagagttagcggcgcttattctggaaccggtggtacagggagcaggcgggatgtggttttatcatccgcagtacctgcgcgaagcagaaaagctttgccggaagcacgatattcttcttattttcgatgagatagcaacgggattcggacgaaccggtaaactttttgcttgggaacatgccggagtagaaccggatataatgtgtatcggtaaagcactgaccggaggatatatgacactttctgctgtattgaccagcaaccggatagcagatacaatctctaaccacacaccgggagcttttatgcacggacctacatttatggggaatccacttgcgtgtgcagtggcttgcgcttccgttcgcctgctgctcgaatccggttggcaagagaatgtgaagcgaatcgaaactcaactgaaagaagaactagctcctgcacgggaatttccggaagtggctgatgtacgaatactcggagccatcggagtcattgagatgaaacgtccggtaaatatggcctatatgcaacgaagatttgtggaagaaagaatctgggtacgtccctttggcaagctggtatatctgatgccgcctttcatcatcacttcggaacaattaagcgaactgacttccggcttacttaaagttattcaaaaaagatgacagataagaagaatattaccagattttcacccaagaatctgttcctcggtgagcaaaagggtgttcctcggtgaggaacgggcctttcctcaccgaggaaggatgccttggtcggtgagaaactttcgggatacttctttagacaataaacatcttatagacaactgattacgctttcaaccatccatatatcgaatacttattacttaaaacaataattcatgacattagaacatataaaccaggaactccagaccttgaaagagaaaaagaactaccgttctctcccaccgcttattcacgaaggacgagatgttctgctgaacggacaacgaatgttgaacctatcttctaatgattatctcgggctgtccaatgacatttcattgaggaaggaattcttaaaaacactcacccctgaaacattcctgcctacttcctcctcttcccggttactgaccggcaattttagtgactatcagaagttggagcaacagctagccacgatgttcggaacggaaagtgcacttatattcaatagtggttatcatgccaatacaggaatacttcctgccatttgcaatactcacacactgattcttgccgacaagctagtgcatgcaagcctgatagacggaattaaattatcatcagctaaatgtattcggtatcgtcacaatgatatttcccagttgcaacgactgattgctgaaaatcataacgcttatgagcagcttattattgttaccgaaagtatcttcagcatggatggcgatgaagctgatcttcccgctctcattcaactcaaaaagagttattccaatgttcttctttatgtagatgaggctcatgcttttggtgtacgaggaaaaaaaggattaggatgtgccgaagaacaggactgtatcaacgatatagactttttggtaggaacattcggaaaagccattgcttcggcaggtgcctatattgtctgtcggcaactcattcgggaatatcttattaataaaatgcgcacgtttatattcaccaccgcacttcctcctatcaatatccagtggacttcgtgggtgttagaacgcctttcagctttacaacataagagggctcacctgctacaaatcagtgaaaagctaaaggtagcccttacagccaaaggatataattgcccatcggtgagccatattgtacctatgattataggagccagtgaagataccatattgaaagcagaagaactccagcgcaaaggattctatgcattgcccgtccgtccacctaccgtacccgacggaacttcacgtatccgtttttcactgacagcggacatcactgaacatgaaattgaccaactcatcaaactgataaacgaatgaagcagcattttatcataaagaataatcagaagcatctattgcttttcttcgccggttgggggatggacgaaactcctttcctgaccattcatcctacagataaggactggatgatttgctatgattaccgttcattagcatttgataccgacttattggaaacctattcccagattacacttatcgcctggtcgatgggagtctgggcagcttcgcaaatcatgaagcagtacccacatctgcctgtctcccaaagtatcgccatcaacggcaccctctaccccatacacgaaaccaaaggtatcgctcactctattttcgatggcacacttcaagggctgaatgaacaaaccttgcaaaaatttcaaagaagaatgtgtggttcaatagctgactataaaacttttcaaaccatatccccccagcgtccgatggaagaactcaaagaagaacttgccgctatacaacaacaatatttatcattgccgccctctgattttaaatggcaaaaagctatcataggaaaaggcgaccgcattttcctcccggataaccaatatttggcatgggaaaaccaagtggactctcttgaacaagtggaagcggcacattaccaacaagagctttttaacacgatactcatgcagccggagaactgatgcatccatcattttaaaataaagtgattatcaagtatatcagcctattaaacaaatattgattatgaataaacgactaatcgcagaacgtttttcaaaagctatcactacctatccaaaggaagcaaacgtgcaacggcaaatagcaggtaaaatgattcgtttgcttacagaacacataccttctccctgctcgaaagtaattgaatttggctgcggaaccggtatttactcccgtatgctactccaagccctccgtccggaagagttattacttaatgacctttgccccgatatgaaatattgctgtgaggacttattaatgaagaagcaggtttcttttcttccgggagatgccgaaacagtctctttccccaccgaaagtacattgataacttcctgctccgccttgcaatggttcgaatcaccggaaaactttttcgaaaggtgtaataccctactcaataatcagggttattttgcttttagcacttttggaaaagaaaacatgaaagaaatacgcgaacttaccggcaacggacttccttatcgttcacgggaagagctcgaagtagctttgtcaccccattttgacatactgtattcagaagaagagcttatcccgctttcgttcgaagacccgataaaagtactatatcacttgaagcaaaccggagtcaatggcttatcaacgcaatcctctcctaccggaaaacaagagaacgatttgtgttcatcagacaacaattcaaaaaataattttaagaacaatctcccccaacaacaatggactcgtcgtgacttgcaactcttctgtgaacgttacacgcaggaatttactcagggcgcttctgtgtccttaacatatcatcccatttatatcatcgcaaaaaagaaaaaagtatgaaacagaatgtatatttcgtaagcggtatcgacactgatgccggaaaaagctatgccaccggctttctagctcgtgaatggaacaagaatggccatcgcaccatcacccagaaatttattcaaacgggaaatgtaggtcattccgaagatattgacctacatcggcaaatcatgggaatccctttcaccaaagaagaccaagagggactaaccatgccggagattttctcttatcccgcctctccgcatcttgcttcccagctagataaccgtcccatcgactttgataaaataaaacgtgcgaccgaagaattgagtgaacggtatgactctgttttactcgaaggagcaggcggccttatggttcccctcactactgaacttttaaccattgactacatcgtccaagaaaaatatccgcttatctttgttacttcgggcaaactggggagtatcaatcataccctgcttagtctcgaagcaatacaaaaacgcggcattgtactagataccgtattatataatttatatcctaccgtagaagacaagacaattcagaatgatacaatggaatttatccgaacctggctgaaaaagtattttccggaaacgaagtttatactggttccggaaataaaaaagaatctatagaaaaacaatcaccgactactttcactcgacaacaatcgtactcttttgtggattatggctatcataagtaactttcaccggatacatatagccataatccctttttttaaacagtagtcgaatatttatctaaagcctttctcaatgttctttccgaaatcggtttggtcacaaagtcattacaacccatctccaatgccaattctttatccgcctcaaaagcataagccgtcaaagcaatgatcggaatttctttagaataagagcggataatatgggttgcttccagtccatccatacgcggcatttttacatccatcaggattaagtccggttggtactgcttatacatttcgatagcttccactccgtctttagcccaaagcaatgtatattccctgccaatcagattcttcagcaagataaaattgctctccacatcttctgctaccagaatcttcttaatctgttgtacacgattgactgtatttcctttagataccactttcgactctttaaagaatttaccatgctctccggtttcttcataagggatcgtgaaatagaatgtggagcctttacccagttcggaagtcacccctatttctccaccgattttttcgataatcatccgacagatagacagacctaatcctgtcccttgggcaaaagagttcagtttgacaaaacgctcgaagatatgatctaccttttccggttctatccctattcctgtatcctttacatacacacgaatatctttatccattcgtccaaaacctaaacggatctctccttcataggtaaacttacttgcattagtcaggaaattcgttatcacctgcatgatacggttctgatctccctccatgagcaaatcctcctcctcattatcaaaaacaagagttaccccttctttcacacgttctttatgaacagtataaattgttcggcaaacctctcccagattcattggacgtttgatatattccagtgttccggcttctatcttcgataaatccagaatatcattaatcaattgcaacaagatatccgaattctgattgataatacccgaatagagctttttctcttcagcagtttcggcagaaggcaataattgggagaatcctacaatggcattcagcggggtccggatctcatgactcatgttagcaaggaaagcacttttcaatctgtcggattgctccgctttaatccttgccttgattagttcctgctcaatattctgaagattagtaatatcccacgaaatgccaatcagcaacggtttacgtccctccatcggtacgagtgctttcaaagtttgcacgatacgtgcttctccattagcggacagataagtttcctgcatatcaatacgcttatgagtctggagtaattccaaatcatccttacggaatttctccgcgtctccgtgcaccggaaatatctcataatccgtatgcccgatagctttagatgccggaatacccgaatgatcggcaaatgccttattccaatataaatatctaagatcatcttctggatctttcacaaacaaatagaccggaatattatttaaaatgccatctaataacagattcagttcacggagttcatcccgtttcttgataacatcggtaatgtcctgcgtaaaaaaccaggtgagttcctgattattttcacgaatcaggaaagtagatacctgatgtactctctccttcgtatgcccgtaaggtatataagccgcccgataagccagacttccttcatgatcgcgtatcacctggagcttttgttcccatgcctccttgttggtcatagagacacgcaaatcatatattttttgtgtacccaactcctgcgttacaccgtattcttctataaattgcttatttgcataaaccagcgttccatcttccgccacagcaagaatactgtcactcaccttatcaagcacacttttaaaaacttccaattgtctttgggtagccactcgttccgttatatcacgacacatgatcagcacatattcctcatccaacggaaagatacggttctcgtaataatggcgttcaccattaaaatccagttcatggtgtgcagttgaaacagttccggtggtgatagcatgacgcatattggagtgaatattctgatatgcttccggtggaaccatatcctgcatacgcatccctctaaaatccttgtttgatattcctacatggttggtttcctcattggaaacaacttcaatacctacctcactctgattgaagacagtcagcatatcaggaagagagtctagtattctaacagcatatttttctttaaaactaacaggacgatcgttatatttctcatccctaagggtagaaagttcttttctaagctgctcgttttcttttttaagtgcttctaactgttctaataatgcttctttgctttgttcgatgctcataatgtaacggtgtaaatacgtacttatctgccaaaagtaaatatttttttgaataaaagcacgtatttaccccgtttttttcaaagaattactcaattaccataatccggtcgttcaatcccaccttcatgccatcttccacgaatacttctttcacaactccatccgtcaccgaacgtatctcattctccattttcatcgccaccaatacacaaagcggatcaccccgcttcacgagatctcctttctttacatacgtcttcagaataactcccggcatcggtgcctgtaccacctgacgccctacggattcagcagcagtgcgggcattatgtatcttctccatttctccctgcaattcaatctgataaagctcccctttattcataatcgtatatgaattattggaagaaggagaaatctgcactccatgcgagtggtgatcgatgatgatcgaatggatagagtcgccacccatgttataatcgacctcatatatcttaccattgactgcaatcttcttgattggcccgtcctccagaatttctaccttatattcactgtccggcatatcctggagcttggcgtaatatgtagctaatgttgtacccataatctgttccgttatttattagtctcaaatcaataattattagcagtcatctgcaatttaccataatacttccagagtgattctcctactaccgggagtgttgttgcacgggaagccgcttctttctcgcgctcgtaatgtcgcactgcggcagcaatgacagccactgtcggatctgtattctgacgacgtttcaggtcttccttatcgaagcgtgtatcaataaacgtcgtgtcatattcacctttcaggaaagccgcattcttcaatacacgttgatggaaaggaatcgtcgttttgattcccagaatcttatactcgcgcagagcacgtgccatattagaaatggccgaagcacgggtacgtccccaacaacaaagctttgcaatcatcgggtcataatgcaaagagacttcaaatcccgcataagcggcactgtcaagacgcaggttacgtccctcgggagcttcacggacagtaatcacaccgggagaaggcatgaagttattctccggatcttcggcgtaaatacgacattcgatcgctgctccgctaaactcaatatcatcctgtttgtaaggtaatggatttccggcagcaacagttatcatatcccgtaccaagtcaacgcctgtgcactcctccgtcacaggatgctctacctgcaaacgggtattcatctcgagaaaatagaagttctggtccttatccatcataaactccaatgtcccggcactgtaataacctatttttttacaggcttccacagctaccttcaacatcttctttctcgtctcctctttcacaaaaggagaaggactttcttctatcaccttttggttacgacgctgaatggaacattcacgttcatacagatgaacgacatttccatacttatctcccatgatctgaacttcgatatgatgcggattctcaatatatttttcaatataaaccgcatcattgccaaaggatgtccctgcttcggattgcgacaaacggagagcagtttccacctcttcttccgtacgtaccagacgcataccttttcctccacctcccgcaagtgctttcagcataatgggatagccaacttcattagctaccttcttcacttcatcaatgccctgtacgggtgtttcggttccgggcacaataggcaatcctgcttcccgcataatcttacgggcctccgtcttgattcccattttggaaataatatccgcactcggtccgataaaaatcactccctcttcttcgcaacggcgggcaaaatccgcattctccgacaggaaaccatatcccggatgaatagcggctccggtctttttggcaatggacaatatcaattccggctttaggtaggaggtatcttcgggcgattcggagatgcaataggcttcttccgcataacgcacgtgcaaagctccgcggtctacatgggtataaacagccactgtcgagatattcatcacccgacaagtccgaaagatgcgcatcgctatctcaccccggttggctactaatattttttttatcataatctttttctttttagaagtcaaaacttaaaagagcaatttaataattttaggcacggatttaatccataaacaggcttacagcggtagattagaatgtttctttggaggattcgactgccgtttgttggcaagcatctcgaaacttcgaatcaaccgcaaacgggttactgccggatcgatcacttcatccacatatcccagttccgccgcccggtaaggattggcaaactttccgcgataatcatcctgaagttctttccgtttctcttcgggtttctcggctttatctatttccttacggaaaaggatattcacagctccatccggtcccatcaccgcgatttcggcggtagggaaagcaagatttacatctccacggatatgcttggaactcatcacatcgtaagcaccaccgtatgctttgcgggtaataaccgtcactttcggcaccgtagcctcacaataagcataaagtaattttgccccgttacggataattccgccatattcctgatcgattcccggaaggaatcccggaacatctaccagtgtcagtaaagggatattgaaagcatcacagaagcggacaaaacgagcggctttgatagacgcattgatatccagtgtaccagcaagcaccaatggctgattagccaccactcccaccgtttttccattcaggcggatatatcccgtcacaatattcgcagcatattctgcctgaagctcgaagaaactattatcatcagccaccgcttctatcatctcttttatattatacggctgattcggattggacggaatcaaatctgccagttccggagtcaggcgagtcggcgaatcgctggtcgctacaaacggaggctcttccatattattccccggcagataggagatcaattcacgaatataattgatgcactcaatatcgttttccgcagaaagatgggctacaccggactttgtcatgtgcacgcctactccaccgagttcttcttttgtcacttcttcctgtgtcacgcttctcaccacatccggtcctgtaataaacatataaccggagtttttcaccatcaaaataaaatcggtcaatgcaggagaataaacagcaccaccggcacaaggtcccatgattgcgctaatctgtggaatcactccggatgccatagaattgcgcaggaatatctcggcatatccggccaaagaacgtactccttcctgaattcgtgcacctcccgagtcattcaatccgatgatgggtgctcccatctgcatggccatgtccatcactttacaaattttcttagcgtgcgtttccgaaagagctcctccaaatacggtgaaatcctgtgcgaatacataaaccaggcgcttgccaatcataccatatcccgtcaccaccccgtctccagcgaatttctgcttttccataccgaaatcggtacaccgatgggttaccaacttatccagttcgataaacgaacctttctccaataataaatcgatgcgttcacgggcggtcagcttgcccacagaatgttgtttttcaatgcgagcgtctccgccgcctttttctgctttcctgttcagttcttccaggttgctaataagctctttcataggctgtaattattaaagttgtatgtgtgtgtaaaaataaacagtaataaatgaaatcattgtcatattgattacacaaaggtacttttatataatgaacgcatcatgcgtggaaattgttagcatttatgccttaaaacatctttatccatttatttagggagctttttttgcaggttgcgacaacaaacttccccgcttttctgtttatcgcttatcatttttaataaaacctataccctaacaaaatgagaacaattaaaatcttattagcagccggtttcctgctcgtgttcggtacaagtattcatgcacaggtacaacggaatgaaacctatctacccaaatttgccatcaagaccaatgctctctattgggccacttctacgcccaatttaggaatcgaagtgggattggcaaagaaactgactctcgacatatccggtaactacaatccgtggaagtttggtgacgaccgtcaaatcaaacattggctcgttcagccggaattacgctattggctctgcgaacgtttcaacggaagtttcttcggtttgcacggacattacggagaaatgaatgtcagcaatctgaatatattcggaatgggacatgaccgttacgacggcaatctgtacggagccggtatttcctacggatatcaatggatcataagcaaacgatggagtatggaagctaccatcggagtgggatacacccgtctggaatatgataagtatgctcgtggtgacggaggtgaaaagttgggacataacacccgcaattattttggtccgaccaaaatcggtcttagtttcatttatgtcatcaaataatcgaactctctaaaacttacaatgatgaaaagaaaacttatttatctatttatagcttttgcagccgccatcctaccggctcatgcacaaaaattcctgaacgatgcgctcactctctcgaacgtatctttatggcaacaaggtaactctctttatgtcggcatgaccttcgacatgaagaatctgacaataggttccgcccgaagtttaagccttattcccctgctgacggacggacagcataatgtacccttgcaagaaatcatcgtcaatggtaaaagacgcgaaaaagcatatatccgtagtctggcaatcactaagcaagaacctaccgccattatcgttccttataataaaagggaaacttttaattatacgcaggtgattccttacaaaccctggatggctaatgccagtttacaacttgtagagaatctatgcggatgcggcaattatcaggaaatgaatgcacaggaactgattaccaatgatgtatctaccgaagccaaacgtttaagtgccatgtctcctatcattgcctatattcagccaaccgtagaagtggtcaaaaaccgtagcgaacaatatgaagctcatctggattttccggtcaacaaatcggtgatccttaccgacttcatgaacaatcatgctgaattggtgaatatccatgccatgtttgacaaaatacagaatgaccggaacctgactgtaaaaggtatcagtatcgaaggtttcgcctctccggaaggacctcttgccttcaatgaacagctttccaaaaaacgtgcggaagctttgaaggattatctggttaagaacgaaaaagtgtcttccaaactatataaagtgacttttggtggtgagaactgggatggattggtaaaagcactccaatcttcttcgatgaaggagaaggaaacattcctgaacatcatcaaaaatacgactgatgatgccaaacgtaaacaggaaatcatgcgcgtaggtggtggagccccttaccgtaccatgttgaaagagatttatccgggactgcgtaaagtgaattgcaaaattgactacaccgttgttaactttgatgttgaacaaggacgcatcattatacgtgaaaatccgaagtatcttagtctgaacgaaatgtatcaggtagctaacagttatccgaaaggcagcaaagattttgttaatgtatttgatatcgctgtacgcatgtatcctactgacgccgtagccaacctgaacgcaggagccgtcgcattatcacaaaaagatttgaatgcagcagtgaagtttatggagaaagccgatcacaataccgccgaattcataaacaataccggagtctacaatttccttaacggagacattaagcgtgccatggccgcattcgagcaggcagcaaagctaggtaacgaagctgcccttgccaacttaaaacaattacaacaaattttaagtgtgaagatgaaataaacagaaaaatctatttattcaaccgaccaaagtggggcgttcgtttgttatatcaataataaacgacgttccactttttaaatctgataattatgaccttgatccttgctgttattccagtgttactgttgattatactgatggcattttttaaaatgtcaggtgataaaagtagtatcatttctctgattgtgacgatgctgattgctcttttcggcttcgctttctcggtagacaatctgttttactcctttttatatggagcattaaaagctgtctctcctatcttaatcattattttgatggctattttcagttataatgtattgctgaaaactgaaaagatggagattatcaaacagcaattcgcttctatttctaccgataaaagtattcaggtgttattactgacttggggattcggaggtctattggaagctatggccggcttcggaacagcagtagctattccagcggcaattcttatcagtctgggattcaagcctatcttttcggcaacggtgagtctgattgccaatagtgtagccactgctttcggagcaatcggaactccggtattagtattggccaaagaaacgaatttggacgtattgcatcttagtacgaatgtcgtattgcaattatccgttttaatgttcctgattccgctggttctacttttccttactgactccaaacttaaatcgctcccgaaaaatatattcctggctttattggtaggcggagtctctttagccagccaatatgtggcagcaaaatatatgggtgctgaatctccggccataatcggcagtattctttctattatcgtaatcgttatttatggaaaacttactgcatccaaagaagagaaaacacgaaaaagtcatctgaaaacgaaagatatattaaatgcatggagcatttatttactgattctgtttctgattattctgaccagtccgctctttccgggattgcgtcatactttagagaacaattggattacgagaatcagtctgcctatcaatgcgtccaccgtcaattatactatttcctggctgactcatgccggagtattgcttttcatcggtacttttatcggtggattgattcagggggctaaagtaaaagatctgttcatcgttctttggaataccgtgaagcagttgaagaaaacattcattacggttatctgcctcgtggggttatctactattatggatagttccggaatgatcgctgtgattgccacagcactggctacggctaccggaagtttgtatccgttatttgctccggttatcggttgtttgggaacatttatcaccggaagcgatacatcttccaacatccttttcggaaagttgcaagcaagtgtggcaggacagattcatgttagtccggattggctgtctgctgcaaatacagtaggtgctacagggggtaagattatctctccacaaagtattgccattgctacttctgccggaaaccaacagggaaaagaaggtgaaatactgaaagcagctattccttatgctttaatatatgtggcgattacaggaattattgtttatattttcagttaattaccctaaaattgaagaagataataatactgttaacaaagcgtgataatacttccgcttaaccattagatattaaaacatttagctcgtttttgcacggaaatgaatgaaacagtgcgaaaatgagtgaaactgtatggattcggtcatacatagtggaaaaaacatctatcattcctatactgtatctattttagtgtagcattaggtgagataatccatttaaagacatacgaatgcacactttatagggtgataacctgtatttgacagcttaattatctatgaggagcggcagtatttctatagttcacaagtgtgtgccgtacagcccacgcatgtaaaccatacagcctacatatgcgggctatgcagcacacacttgtgggctataaatttatcgctgtttaagtgggatttttgagctgcgatattcggatttatatggcttcattgtgacaaaaacaagccgtcttatgcttataggatatttatacggctattttgtagatgataggtaacccgtttttactggtaaaagtatgatagatacatttttttaaagctatctagcatagatattacagtgataattaaaacattactaaaatgaatgatagtatgatagatagttttttcattatgtaatgtttagttcaaactcctatactatgaattagttcaaatccatacagtattgtgaatactactaaaaaacacatggcagtttaagcagatgtacttagttaactatatacatcttgagaatgtaaaatatttgcagaaacgacttaatgcaggatccgatgaagaaaatagcagtaaagcactgatataaaccggttcttcttggtagaaaacgtacgaaaagtgccagaaataagcaatcacctttactacagcattagcgtagtgagggtgatttcaacttattctctctcacatctttccttgaaactgttaaatataactacaaataatttttaaatatcttatctattatacttttctgaagcatcacttccataataggtgtttctctatcatatttataatatctcttatctttacgcacataaatatatctaatatactcataacctgtagcacaccattcctcaatatcaaatctaatatcatcatattcgaaaagaagcactaatctattatttatatcaacagctccatatttactatccttagttactattacaacatctttagttacataatccaaactatcatattctgtaggaagtaatactttaccgatataatcaataattcccacttttttatctttcacaacataatgcgcggaaggcccatattcccaccatgaagaaatcgaatcatactcgcagggaattagctgctcaccatccttcatcaccactcccaccttatcctgcctcttcactacaaggctttttcagccaagaccaaattaaagtcatcatcagctgaaatttcctgtaattttccaaagccgaaaatagtatctcctttattatccagccaagcataaccacgttcaccacacaaaataacgccccatttcccttcctgaatatatatgatatcgttctcttcttgtgcatatcctatagaagatactaataaagagaataaaagtaaaatataagttttaactatgtgttccatgatatcagaattacaaccatcataatattctcaaatataacagatataattctgatacacaataattcttctaacaaataacaattctatttctcatcatcaaatgagtggctctagaatcacctttatcaacttttcacgttgcttataccacatgatatacgacttcatgcgcttccgccagttgaggaacctccagtttatccaacattttatctaaaacagattcaggaagtgcatattccctgcttttattttgttgacgccaaatgtggtatggttgttccagatagactatctttacttttgcaccataatcaacaaacaaaccaatcaattgagcacgcatctgacgagttatgttagtagcattccaaacaaagtcctgacctttgcggagatacgttctggcttcctctttcgctgtttgcactacccatccattcgcagacttatccgtaggactcaatttgtgttttcgacgaatgacgtccaaactcaccaccggaacatctatgccagcagattgaatataataatccttccccattcccggaagtcctgacaacatcgtcacttcacatttaaactgttcgtgagggacataatcaatataactgtcttcagtatggaagtaatgaaaacgtgcataatcagtggcaaatcctcttggtttcttccaacaatcctgttcacggcagaaaatctcaaacaattccagtgcttccagcagttcattcttatcttcacaaatgcgtcctctgatatcagcgtcggccaacatctttagtaataaagtatctacccgtaaagaagcttcacagagtttcttcacagagtcaggcttctccatcagccaaacaggtaatccatgataccggactaaagatgcaatctgttcccggatatggaatggagcaggacaatcccggtataaaatagtgcggacagtgtactctccttttctggcatgtcctttagcagatacccgcccctctccttcatccacggaagttgaacgtttttcaacatcatgcaacaaggcagatgtccaaatgatttctttctccaaagtagaaagagaatgataagcggaagactgctgcaatgcctccaacaccatacgggtatgttcggctacacttccctcggcatgataacgaatatcctgctgaacagtattcatttcgcgcacccactcgaacagttgttcgagtgagcaccacgatttatcttctatcaatttccaattcatctttattcctccttttcattattaaattcccaaacaagcggggcacgcttccagttacgtgtccaatgctcgtctgttttaacatgtcctttccgcacatacttaaatacattatgtgcaaattcgcttaccggatattctccgacattgcggctgactactccctcacgggtacaaacctctttcgtccacggatcacaagagccgaagatagccggttcttgtgacatacggatgatttcctgttttaatagttccggtgtcaaaccggaaacagactctatcttcaactccggaacagtaggaaagtcgaataaagctgcataaaactttacttcttcccacgacagccactgatccatacagcggactgcaaaaacataaaaatgcgtttctaatcgctgatattctatggaatgtacggcatatagattctctccaaagatttctatatcacccaaatcattctttatcaattcccaacgctcacgcagttgcctcgtccaaggtgaagtagtaggagcagcatgcgaacgggcaaaaacaccccactgacttaaacaattattctctccatccagcttctcggtatgcaccaatgtccgaatccgttggatgtcctcccaatacgtatggttaatccggtcgtcactagtcgttccgggagagaacggatagtgataagtgcgaccatatttctctgatatcatttctttctttttttttaattaaatactaatttctttcatcacatcactccttattcattcgaacgatgcgaggcataaatttaccctgcacttccaccagcgtttcctgtgtatacatcactctgtcaatatccttatatgccagtggcatttcttccacgctcccaccaatcaaagtcactcccgcctgcgacagtagtttcttcaaagccgattgcgtaaaactatcttttgccttctggcgggacatcgccctgccggctccatgagaagccgaatttaaagcagcttccatccctttgccacaaaccagataacctgcagtagccatgctaccgggaatcaatcccgcttgtcctttctgtgccggagtagctcctttgcgatgcacgattgccatacgccccggtgctatttcctctctccaagcgaagttatgatggttgttgacattagcgagcggcttcaaccctaatgctttcgccaaattcaaatgaattcgctcatgacaggcacgggcataatcacctgccagatccatactcatccaatactcctgccccgcttcagtgtttaaatccagccaggcaaaatgctgtgcttcacggggaagcctgcacacttcacgtgccaacaggctgtaatgtttggcaatggcagctcccaatcctcgtgaaccggaatgtgacaacaatgccagataatttccttctggaagattcaacacgttattttcttgcagagcgatctcgccgaactccacaaaatgattgccaccaccggaactccccagttgacgtactgcctttccatgcaaatctctcaacaaaggcgtcaaacggaattcttccctatccaacacctcatgttcttgctcaaaacccaatccgccatccataccgaaatgagtgaaatctttcaaggcttctttcatctgataggtatatcgtttcaggaagtcggcgctggcatcaaataccgtcaggctcatccgacaaccgatatcaacacctacggcatacggaatcactacattatccgtagcaagcactccaccgataggtaacccgtatccggcatgagcgtcaggcatcaatgctccggccaccgttacaggtaagcgcatagccaggttcatctgttgtttggcaagcgtttcgataaatttacctccataggttttatacatcaacggctcatccaataaatcataagctataaactctttcgctatgatagtaggcgaaaggcgttcggccagcttattccaaatttcattatttttgtaaaattcgggatgctcgagtatatcgctcaatgtcatttcaatctgttctttagtgtcgtatttgcaatgtttgctcacaatgtccactaccagactacgggcaacattatcccggtatcccagtttgcttaaatcttttaatcgtattcccatactcttttttcgttcgcatacagcattccctgtcggcctcaccggcagacaacaatgcaatacacgtgataccaatgctttggatatggatatgaaatacctcaccaccgcattgaagtgattaatttaaaatataaaaagtgattgcaggactaatcaacgattaccgcttgttagtagaattgcggtcaatataagaaccataggttcagtgtaaaaacagtaagttgcaaagcctcatcctcccgacgagacaacttagtcctaatttgaaaatattataactccaacataattaataccctttccatctgtttttaaagggtgaatactcattttatcgcggcaaaagtagtgcttatttttattttctccaaagaataatagacaaattttagcgttcggtaactatccgagggaagttttgccaagagtttctgtcaaattgctattttttactccctttatatcccctatctttgcaacagagaaaacaaaaagaaagatagtatatgaaactaatgaaaggtttattgagtgcttttgccgttgtattggcaaccacagcttgtgcaggcaacagcggagaaaataaaaagagtaatgaatcaacaaaggaggacaataaaatggaagtagtagcattaaataaagccgattttttaaagaaagtatataattatgaagccagtccgaacgattggaaatttgagggcagccgtcctgctatcgtagatttctatgctacctggtgcggtccatgtaaggtgatgcacccgattctggaagaactgagcaaagaatatagcggtaaagtagatatctaccagattgatgtggacaaagaacaagatctagcagcggcattcggtatccgcagcatccctaccttattgatgattccgatgaaagaggaacctagaatcatgcagggagctatgcccaaagaccagcttaaaaaagcaattgatgaatttcttctgaaacaaaataacgaagcaaagcaatagacttcgacttttttctcgtcatggtgactaccctctattcgtcttttgaagatggatagagggctagttctttataataggttgccttatggtattcatttacagtgaaaaggtaagaattttacttttcaccgctggacttcgaattgaagatttatgtacttttgtctcatatagatatgtattagccaataattaaagcaatattctaataatatgaagaccaagcgtacaagaagttcttttcgttctatgaattcggaaagaaggttagagtccatctttttatttgttaccggaaagtgtaatgccaaatgtgccatgtgcttttatgccaatgatatggctaagaaagaaaaggatttgactttcgaagaaatcaggaaaatatcagagacggccggagaaatcaacaagttgtgggtatctggaggcgagccgacgctccgggaagatcttcctgaaattcttgaaatgttttaccgcaataaccaaatcaaagatgtcaatatgccgacaaacggactgaaaccggatcgtgtcatcgaatgggtgaaacggttccgcatcaactgtccggattgtaatatcaatgtcagcatctcactggatggattcggagatacacatgatacacaacgaggggtaccgggcaatttttataaagcggcagataccatacggaaagtaagcgaacattttaaagacgatggaaaagtattgctcaatgtagccacggttatcactaaatataatatagaccagattaatgatttcatgacgtggatgtatggacgtttccatttatctactcatacgattgaagcagcccgtggcgtcacccgcgaagacggagtcaaagcattggacgaatccaccctccgacggattcaggatgaagcagcccctatatatagagcttatgccaaacgaatggtgagtagcacttccggtttgcgcaaacctatcacaaagttcttctatataggtattatccgagctttatatgatatccgggcaagtaatatcgaccagccaactccctggggtatggactgtacggcaggagaaacgacattggttattgattatgacggtcgattccgttcctgtgaattgcgtgaaccgcttggcaacgtgaaagattacgattgcgacgtacagcaaatcatgcaaagtgaagctatgaagcaagaaatagaagcgatcggacatggatataaagcaaactgctggtgtacacatggttgctttatcacttcttccttaactttcaatcctcgcaaaatgattaagaaagtatataaaggttatcgtgaagtgaacaagctcgacaaacccattgatttcggcgaggacaatatgtctaaaatggaagagcattaccacctcgaccgggaaaaattacgtctgctcggcattatccggaattaatcactataagcgttccgccatgaaaatacttttggttaccagaggatcacaaggagatatctatccttatctgaccattgcctccgcgctgataaaacgagggcatcaagtcacattgaatcttccacaaatatttgaaaaagaagcaaaagcatatcagctggattatgtcttacaggattttgatgatatacaaggaatggtatcgaaagcaggagagaaatcggaaggagccaaaccttatctaaagtggatgcgcgatgtgattgacgtacagttcaagcaactgattcctctactgaaagagcatgacatactgatagccaccaactccgaatttgcagcagccagtgttgctgattattgtcagaaaccatttatccggactgcctttgccccttttatacccggcaggcatatcccccctcctatcttcccttatccaaagcctcatccaattttcactccccggtttatctggaagctgctcaatatcggtaacaactatatgacgcagaaaaccattaataagaaccgggaacagttaggactgaagcctttaaagaactgcggttattattccacggaaagagcctttaattatatgctgtacagccgttatctcggtaatacagatcccgattggaagtataaatgggatattggaggatactgtttcaatgacgcactacactatgatacggatgcctatcagcaacttctggatttcattcagcaagaacaaagacctgttatcttctttacattagggagttgcagcgcaaaagaaagcgatgctttttgtaatcggttaatccatatctgccgacaactgaatttccggttgattatcggctccggctggtcgggtacaggaaagtccttagcaaacgataaggatatcttcctattgacacacaccattccgcacagtctgatatttcctcactgtgatgctgtcatgcatcatggaggaagcggaacaacacacagtgtagcccgtgcaggtaaaccacaagttgtcatgccgctaatcatcgaccagccctattgggcttatcgtgctcaacagttgggaataggaccgaaatgcatcaaaatcaataaagtttccgaccgggaattaaaagaaaaagtgaatgatttggtaactaatcccatgtataaaacaaaagcaatagaattagccaaacaaatccgcaatgaaaagtctgtggataatttctgtgattttatagaatctgtggtgatgaaaaacaaaaacatataaatgaatacatttatatagaataccaaaagccacaagaacaataaaggtttgcaagtaaattactttcattgtacctctatcgttcttgtggctttagctttgaaattattatagttttctctgaacaccgtcgtcaccaacgacgtaataaactccattgtctatcaatacagcccgtccacgctttttcttccgattctccttattgtcaacattgacagcgatgactttaccattataaaaggttgaaatatccttgaagatagtgtgccccacaaggatatgttttaccatataacgatccaacatcatttgtaaagagtcctgtaccaacggtttatacttgggatcttctctcatcaggccgcgataccagatcggaccgtcattaccatacagaaaatcagtcagtggagaaagcgccttacgctcttttttgctcatgaaaagtgcccggctcatttcctcgttcacagtggggatattcaagtccttatcatagaataattttcctaatccggcatgtacatataaatcggttccaatgatttgcattgtattacgtgttgcaagccaacggcctaattcggtatttgtgccgaataatgaaggatattccactcccagtttttctgccagcaatttatatttatcttttgtatagcgaagatcgttggacaacaccagagcctcatggtttcccaaaaggaaagagacatgacctcccgctttagccgcttcgtcttctaatttatagaacagccagaagatctgcagtacatccttgccacggtcgaaaacatctccgataatcaccaaatgattgctaccgaaattccattgatagttatcattaatcactccatttccttgtaacagactaatcacacaatccagccgcccatgaggatcggatatcacaaaaactttttccggacgggtatattgccactccggtcttttcaatggatggagttttacatcaaacggatatcgtccctcatggtccgtcacacggaaactgaaatctttaggtaatgtcgcataagtcttgtctgtaatccgtcctttcttattgacattaataacccgcgtactaccgtctgcctgatagagtatataaggtccgtcaccagataatttttcttttttcttatctcctgaatgataagttccggcctgaatgccggaacttattaaaacgagaacaagagtagaaagaaataatctcaaaaaacgagtgctcatattcttttctttcttgaagtttattttttaatcgttactaattctccttcgtcattgatggctttaatatcatctccttcaataaccacggcacgagtttctttttcaaaagctttgggatggttaacacaaatatcatatacctttttattataggtatacttcacacgactattttccgtatgaccgataataatacgtttgacatcatattgagccagaagtttatctacatccgcttcctttatcggactgtactcactgccagtcttaaccattccacgataccacaacggaccgttataactatcactataaaggaaatcggcaatatccggatattgttttttccgttcctcttttgaaaggtaaatgctcttgctcaccagttcattgatttcgggaattgtctcttcgcgttccataaacaccttactcaatcctgcatgaacataaaggttttcacctacaatctgaatggtgtttttagaacgcagccagttacccatcacattcgtcagtccccacatttttccataggtcatgttcatcgctctttgcgaaagagtgttgtacttggcatacgtatatttcagattatcacgcattatcatttcttcgtgatcccccaagatggttgtcactctgccgccaacagttttcgcctcaaattccaatttgtatatgagccataaaataggaagtacgtctgctccacgatcgaaaatatcaccatcaatcaccaaatggttactgccatatatccattcatatttatcattaatcacttcccctgttttcagaatagcggcaaacaagtcgaaacgcccgtgaaggtcggatacggcaaatgttttagcatactcggtacggttttcccatgccggacgttcaaaattctcaatcttattaatgggtacctgaaaaaggagctgattatcatccgaatacacatccagtttcaatccggccggtaatccggattcttcacgaatgttcaatgcattatctttagtcacttccagaattttaagtctaccgttttcatagaaaaggtaaggaccatcattacggaaatgagtgatttcagctatatccggtcccacgggagtcagatcttccccgcacgaataaaaggccgtgatgaacaaacccaaaaggaaatagatgctatatatctttttcataatttctatacgttaatgcgttaattaatgcaattcatattccggattctgaaccatattttcattgtactccatttcgtggttaggaacaggaagaacgattttataataactccaatcaaactctactgcttcattgggaacttcgctcaaataatcttcacgtatcactttcttgttatttctaagtaaatcaaagaaacgttgtccctctccccagaattcaatgcgacgctgttcaagcaccagatccagatttataccttcatccgccacagcatccagatccttacccgtacgtgcataaataggtttcagatacttgcgcgtattaggtatatcattcctcttaatcgcagcttcagccgcattcagatagagttccgacagacggaaaaccgggatattggcatcttcatacgatttagaaccttgtgccggatatttcaagcaataaggtttactgctacttgccgtagacaccatctgactacgaacatcatcggaattgtctttcatgtagtctttccaatacttttcggtagctatcagattatatttggtgctaagataaccgatggatgattttcccggactatcagttgtcagattcacaatttcgaacaacagttcactattgaacggagtagcccatatcttggcatattcatcattggtccacaacttatagccttgtttttccgcacctttgatagcttcggcagccacatcgtatgcctctttgtcattccccatatagagataaacccggcttaataatgtcattgccccccatttattgattttaccctctttctttaccggacgaagcagcttcaccgcatctgtcaggtcgtctgtgatggccttataacattgggcggtcgtattgcgggaaggtttgatattcttatcttctaccactttatcaataatgggcacagccagtgatgccccgttatctttcagataaggatacccgtaaatacgtgtcatatcgaacagcaacaaggcacgtattgccaaagcctctcctttcaagtcattataatattcctgctctgtcagcttctccagtttcggagttgtaatttcccgatcgggaacaagctttatcttttcaatatcccggaataaaatgttcaggttcttaccaataccgtagtacatcccccagaaaccactaggtccattcgtcttattgtacttgaatgtatagaaactgacattggtgctggaagacttataagatttcatgtcatctcccctcaaatcaccataacagaacatatctgctccataataactggatgactgcatactgctgtatgcaccgttcagcacaaattcaaaatctcttaattcggtcaatgaaccatcggtttctatagctgtggaagattgcaaatctaaccagtcatttccacaactactcaataaggttgcaaagacacctaaagctatatattttatctttttcatacttattcatttatagattaatgcacttagaatttcacttccaaaccgaatgtataggttctcatcggaggagtatcccaccaactaggtgatgaacccgattcggggtcaatataatcgtatgccgcccaagttaacaggttattgcccgatgcatacagacgtatattgtcgatacccactttccgggtccatgtcttcggcagtgtaaagccgaaagtcagattcttcagacgaacataatctccactgtataaacgacgtgtggtagcataatcggtcatggaaattgatctaccgactacaaaacgttcaatactcgtttcatcaccctccttctgccagcgtttccggtaataaataggaatattcagcgttccatcgccaccgtgttccagtttgcctgccgcgccgtcatagttccatgccccaaaagagaaattcacgttaaaattcagatcaaaccacttataagagatgctgttacccagtccaccggtgatagtaggatcggcacattgcagtatcactttttccgcactacgcggatctttagtagtttctttgttcagatttccattttcatccgtcgtattcttatagaacatcggttcaccgtctgccgggtcgatgcctgcaaattcaatcatataataggtagaatagggcaaacctaccttatgaatagatgttccgctggttacttgtttcaaatctccgtccaacttcaggattttattggcattatgtcccagattcaaactagtactccaacgaaaatcttttgtctcgatattagttgaacgaatttccaattcatatcccttgttttgtaatttacctatgttggcaagataacttgagaaacctgttgcaagagataatggccggctgtaaagcagatttttcgttgtacgaacgtaatattcaaatgtaacattcagtctgttgtcgaagaatcccaagtcgataccggagttgaagttgtagttggtttcccaagtcagttccttgtttttcagttgcgactgcgtgatacccggattatcgttataattactagtcagactgctcaatcccatatatccataataagaagacggcagagttccgttcacaccgtaagaaactctaagtttcaggtcacttaaccagttctgaagaggtttcataaaactctcgctactcactctccatgcaccggacaatgaccagaaatttccccaacgattctctcttgccaatcgcgaacttccgtctgttctccaactcgctcccagatagtatttgttgtcataatcatagttggcacgtgtaatataagagacaatacgcgtcgtactgttagaacctcccatactctgatacactacaccattgttgacttccggtttatcccagcgtgcaaaattagagatagtagttcccagtccatccgactccttactgttgatttcataaccagccaaaaggtccagattatgttttttcttgatctttgtctgataagtcagaatattagaccatgtcatattggtaatatcattataatctttgctgaaacgcccgttatcatcgtcaccgtcactggtacgcgggtctttccatgcacgagacttgttcatcacaaaatcatagctgaatgtagacgcaaacttgattcctttccaaatatcgaatgatgcatatacggtattgaaagaacgagtcgcatattctctcttaaaattataagaatttgataacatcgggttacggtcatccaatttgattaatgcacggttccaggtgccgtcttcattccatatagggtcagacggtgtggctccattacgcgtaccgtaaattggagaagtatacgatgtcccttccgaataagtatcctgattcactttggagaactgtatctttgcaccgatattcatccatttagccatttgatagtctacattcaaacgtgcagaaatacgttccagaccggagtttatcgtaacaccatcctgcttcatatagccgatggacgtatagtatttaatcttttcctgtccgccggaagctgaaaactcgtaattctggtggctaccgttacggaacagataatcatcccaattcacaaaaccacaccaagggatcggtgcatactggtcaatattcgaatcggcataagcccatgcttcattctcggtcatcccctgatgaagtcccacctcatcatcggtcttaccgctataagttaaagcataatttcgaagcccctcgtggatcaggttacgacgttcctgtccgcccatcaattcgcggaaaggcatggcaaaattagagaatccccaatccgatttcaatttaaagaccggtttacctgcttttccttgtttcgtagtaataatgacaactccattcgctgcacgtgaaccataaagtgaagcagcagcggcatccttgataacagtgatgctttcaatatccgatgtattcaaggtagacattacatccaaaccggaatcactaccagatgcaccaatattacccgacaatacgggaacaccatccactacatacagcggagaattggaggcattaaacgaacccataccacggatacggatggacgttgacgaacccggtatacccgaaccggtatttacgctgacaccgggagccgccccctccaacatctgttggaaagatacattaggcacatctttcacagcatctgtctttacgatactggcagaacctgcataagccgatttcttgaaagtaccatatcccgttacaatcacttcgtccaacaggttattatccactttcaggattatgctcatcggcttgccgggagttgcaactacctcctgtgacgtataaccgatataagaaaccatcagagtcactttcttgtctgtaacttccagatggaaattaccgtccatatcagtcatcataccgttagttgtacctttcacgatgacattagctccgattatcggctctccactatcttcaattactttccctgtaatcgtatatttctcacgtgcaacagtttccgtcctaacgggttcagccttacggatggcaattactccatcatgaaccgtataagtcagtccgctatttcgcaggcatttgttaagcacttcagaaatcagttcattcttcacatccagattttccactctgactttctttgcatcatttgtgctgtagataaaggtaaagtccgtttgtttctgaatttcccaaagaacttcattcagtgttacatttctgaatttggctgtaaccgtggtctgtgcgaatacagatgcgcgcatcagccctgaagtcgtaatacagagaaaaaggaacatcatacaaagacgttttccatatttcccaaatctggcaacattacgtagtttttccataaaacagggattaatgattagtgaatattttgatagtttttccttctactgtgacagttactctacccgtttgctccaacaatttcaccaatggggtaatctcattatagcggttaacatagcaaccgaagcgtaactctttcgtcgcctcattctcatagactacatccatatcataccatctggcaagagttttcatgatgtcgtccaatcgctggtccttgaaattgatctttccatgtatccatgaagtataaaatgcagtatctacattgcgtacattgatctggttgctgcccggagtaatacaagcctgttccgatggtttcagaatccggttgcttccattttcagtctgtacttttaccgaaccgctgacaagtgtagtttgatattcttcgtttgcgtaagctgatatattaaaagtagttcctaatacttctattttcatccctttggtttgtacaataaaaggctgtccggttttgcttacttcgaaataggcctctccctccaattctaccagacggcaatcctgtgcaaactgaacagggaaacggatggaactcatagaattcaactgtactttacttccatcgctcaacgtcagctgatattcaccaccacgaggaacgtttaccttattatatgcaagtttttcggatgtccgggcgggagcctgctgataattcaatgctgtagaatccacctgaatgactgtaccatctttttctttcaattccacgccggaggtagacttcaaatcaattgcttctccattatccagaataagaacggctttcttaccacccggaacaatttgttccgctacttgagataacggctggggttcattaccgctcttatatattgccacagtagcaacaaccaccggaaaaatgaaaatagcagcatatttacatatattcagtatccgatgtctgaaccgatggcgttggatttttctttgcactccctcccatccgtcctctgtatggaaagtttgccgcttctgcatattctgctttatgttctcttccttgcagatttcccgaaaaaggcgttcgttttcggacgattcatttctccaccgagtcagttccgcctgttcttcttcctcgatttcatcagataagtatctggcaatgagtcttgcaatatagaaatgttggtttatcataattcacatgttttaatcgttgtttatactaaaacaggtgaattgaaaatcagggtgtattaaaatgattttttttaaaagaaactataaaaagtaaaaaaccaggtagtaatagtctttcaaatatacgcgtaatttacggtaggcaatctttttctgggagtgtaccgtttcaccggaaatattcagtgtttcagcaatttccggattgctttttccctcaagtgccagttgcataatgcttttcatctgcggtggcagtttttcaatggcatccaccaatatccggtaactttcttctgcaatgaccttgtcttgaaaaaaagagtctttactcatttcctgaactttctgtgcatactcgttcatgactttggtatgttccagttcattcaaagatttattgcgtaccgacgtgtagaggaatgatttaatctgatgcacatacatgaaatcatcgcgcaactgccacaacttcacaaaacactcctgaacaatatcagccgctaatgcatcattttcgacatactgattagcaaacatacatagagatatgtaatatttgtcgaatatagaacgaaactgcgtctcatcagttaacttaatactaatatagtctgttgtgccaatcacgtattctttattttggttacaaatataccatttgaaaattatgtaaccaaacaaaaatgaaaaatcacaatctttgtttcattacaaaaccttcaaagaagtcgtcccggtaactattaccgatagcaatttcatacgattttataaatatatcattattgtcaaatgactcgatgtgatcggtattgacgatataggatttattcacccgcaaaaaaatagattttggtaataaatcgaatatggctttcaggctcatgcgagtaatgatacgctggtcgttcagttgaagaatgacgtaatctttcaatccctcaataaagagaatatcggagaaattcaccttgaaataccggcgctctgcctttacgaagaaatattcagcggcaacaatcgtttcgatagcttctttttcttctttcaataatagagaatgataggataacgctttatccaccgccttttgaaaacgttccgcttcgacaggcttaatcagatagtcgattgcatctacttcatagctatccaacgcgtattctgtataggctgtggtgaaaataaccagtgtctttttggaaattgtacgggcaaactctattcctgtaatctcaggcatctgaatatccagaaaaaccagatcgactccctgttgctccataaagtcggaagcagttgcagcactgttaaaactgcctatcaactggaggttatcggattcttctatcaataacttcatggcctcacgtgccaagggttcatcatctacaatgatacaattcataatgttatacttaaaattacagaatagagattttcatcttctctttgttccaacttataatgttcaggatacagtaatcctaacctacgctggatattggcaagtccgattccaccgactttaccctgccggactgcaacagccggtttagaattctcacaccggaaatccagtcggtgagcatccaccttaaaaaagacatggatatacgaagaatgctcactatcaaaactatgtttcaccgcattttccacaaaaggaatgaataacaaaggctgaatccaaatggaatccacttctccctcctgcctcaacgtaaactggaaattgtcacggcgtatcttttccaaattcagatagtcattcaggaaacggatatccgaagccaatgaaactctttcacgcgaactgtcgttaatctgataccgtagcaaatcttccagtttaaaaagtactttggaagcttcttccggatttctctttatcaggacattggcattattcagcatattgaaaagaaaatgcgggttaatctgattcttcagaaatgtcagttcggattgcaaagtagtggactcgagttcgtcaatacgcaggttataacgcaaccaatgggtaaacaaggatatggctgccgaacctgcggtaacaaaaccgatggtcagtatccccgaaaaagtattaatgaaagtagcgaatctgccaggatcttttccgggcagaattacttcaaagagtaatccctgggtgactgaaaggaagacgatgactaccaaattcgtcaggacagccgccaggacatagtgccccaaacggttcttcaacagaaaacagggtactaatatatacaggttcatatagattaccgtattaatggaaacaaaatatgccaggaatccaccaaaacgccgccaaaaagaaactgactgcaaaggttcgtaccaaaagacattaatagtcatcaaaagaactattatttgcagtaacagatgtctacatgtccggtaatgaggacttagcagaaaagctgtaacgcttttatcttccattcttctatgttctgtattcaggttcatacttcacctcctttcaattccaaccagatgctttctgtcgtcaggaatagtctgtaacgattgccatataataagttcagtctttggcggattctttcaagtcctttatcttccaaaagattcacttgtaggcaaagacaagtgaatataattgtgttctcttctactttcaaatggattttgagagaaacagggattgatgttcgctgttcgttgattgattttacaatatattgcacaaatggaatgaaaagcaagggtggaaccagtgttctatttacttctccatccgcaagcagttcataattgaattgtgcctgagaattctgttccaaggtcaggtaattattcaggaaattaatttcactactaagcaatacctttgttctgctgcaatcatatagctgatagcgaagtagttgacttaatttcatcagcatcttcgaagctttttccggttcgctcaatgtcagttcccccgaatgatgcaatgttttgaaaagaagttcggggctgacttgttcttttagctgttccacttccgaaagaacgtgaaccttttccatttgtgagacacgttgatgatctatcatccattctttcaggagaacggtcattgttcctcctatcatgcagagtgtggacaacatgaaagaagatatataatccatcactataggtatggagaaataggaggcacgttcgtaaaattccggccagcaggaataagatacatattccgttgccatttgtattgccagggcaagcatcattgctactgaaagtaaggatatgtaggttagatagcgtcttttcagcaaaaactttggaaagagccagaaaagattcagataaataactcctatataagtcagtagatataagaaagtgaatgtataaatccatcctcccaatatatcccgataatcgaggaatataataaaaacctgattgaatgatatggtagccaacaccataataagcaccagataacgcgcccatcgaagttccggactaacgaggaatcgatataataaagtagatttattgtctgttgttattgtttcagccatcgtgtatttaatcagggaagatgttttatctccggggacgaagataaaacatttttccggttggacttctatatcggttatttaaaattcaagtttataactcacatttgtcaatgttgtagaaccgtcactaacatcaatttttccagttttcacattatattcatgtccatagtgttctttcgcgccggtaaaattaagtcctttcactgcaaactcatgagagactttcttcttgttgatgcggtaactcacggtatagttgccgataagcatgggagaatactgtttagaaaatgctttcgtttcgtcatactgtacctctttatcaggatgattcatcgttgcttccctgtcaatcggagaataccggtcacctccttgtaaggtcaatttcagattgatgctaagaatattctgtctgttacgtcccagcatccattcctttccaatcagtccgttgatgacataattccgattaaacttcgtattgtaccacacaccgtctccgccccggtagcgggaatcgaaaagagaaccggaaatcatgtaatagagtcctttttccaggaaacgttctaaagtgatgtcaataccgatgttgcgtcctcttcctttattaaccaatgcgtcttccacatagaaatcagaacggttgagtacggaataagagctgtcagccatcacaggcacatcatggagaaattggatataaggttctattttcagattcatgcgatcggatattttgtatccaaaagataacatgacgtgcttcgctttggtgaaatcgagttccttgttgacggatttgtctcctgtacttttcgttttcacaaaatagacgtccattttctccatgcgactgtacataccataagccagtgcaaaagttgctttcggagtagcttgccatttcaaaccaatacggggttcaacagaccatttattattcagagtcagaaattgcccgtaaataccggcattgagcgtccagcgttccgtcaatcctacagaagaactattgtaggcagatatcagactcgtattaccttttccttgagatacggtttccagtgattcggcttcataaggagcaatggcaagattcatttgatagaacatggcattatacgtaaatcctgtcttattagtaaaacggttactgaatttacggttaaaagtcgaagttagtattaagttagtatgttttgagttaagatccatgtagggggtggattccaaagagtggttaaacatggttgctccaccgtccaattgcgaataagtaccggcaatagtggttttcagtgatgcgtcattgttgaagaaataacggtggctgatacctccggcagccatatactgtttgtcttttgattcgctacggtcgctcatatattcccatttatccgtattcttttcaaaatcactgccgaatttatcaatcaggctggttccccagacagagaatgttcctgctttctgtgtcgggaaattcagtttgaagttcaagtcctgatagtccatctttccgccctccaagttcagaagtcctgttgtggaataccgataattgaaaatataggatgctttgtgctacttgcttaacggtccttcggaagctacatcaattcccatgatgcccacttgaagcgtattctcattcttctggttatttccattacgcaatttcatatcaaacacaccagataccgcatttccatattctgccggaaaagctccggtaaagaaatcggaattacccaatacctgcgaactaagagatgaaagtatccctccacccaatgtggcaatatccgcaaagtgattcgggttcggaatttcaacgtcttccaatcgccactgcaacagatggggagcattgccatgaatggatattccattggaagatacactgggggccactccggcaaaggaagataccaaacgggcagggtcgtcaaaacctccggcatagcggctcgcttcttccacactcaacatacgggctccagtagtagccatcttattcatcgcttcctctttattggtcctggcacgaatcactacttcattgagttcgtttacactttctttcaaaggaatttccaaataaacctctttggcggaagttaccagtatctctctgaaaatacccggttcatatcccataaaggctgcctctaccgtatgccgtccaacaggaacctgtggtatgctgaaacgaccgagactgtctgttatcgtaccagttccctctttttcggataatctcaccgttgcatacggtatcgggtgttttgaatccccgtcaataaccattccccggattgtctgtaccggcgggccttttctctgcggtgtctgactaaaagccactgcggataccaacaaagcaaccaacaaaagtatccacccgccataacgatgtgtttttcgggttaactcttcaccaagaactctttcaaaggttttgagtactgtgctgcattcatctgcggagatacccgactgaatagatattttttctaataatctagttttattcatcttcatgattttattctgtttttatttcgtcacgaagatagagtatagaagattgccgatttttgaaatgagacgaatacatcccgtttgtagacaaaacacaaaattgataagacgaaaaatcgtccgaactatggaatttcacttaaagaagaacctctttttaaaagacacatcactttcagaacgatttatatcctctaaaagtgatgtgactttttttaatagcacacgccaacctaccctaaaaagtcggtcttatctttatccgtgatctcccgaattactttacatggcactcctgcagcgattacattttccggcacatccttagtcactacacttcctgctccgattaccgaatttctcccaatggtaacaccacccataatatgaacgcctgcaccaatccagacattatcctctattacaatcggatgtgcatagcaacctcccataatgcgttcccgggcatcaagtgcatgatttgctgtgtacaatcctacacgtggccccaacaatacattatcccctattgtaataagattcccatccaacatgatgcaatcaaaattagcaaagaagttgtttcctatagtgatattaaatccaaactcacaccggaaattgggttcgaagtgaacattctccccaatgcctttcaacaaattgcgtaataatgcttcacgaacctctttgggttttccataagtagagttataatcattagtcagaaaaacgacttgttctcttctctgaaccagttctgtagacaaatcattatacatagtccccgacagcattctttcatacaattctctattttccatatctatatcataatgattgattaaagtccttttgtaatcaccggtaatccgaaaaagcctttttgtaaagtcagtatcttcgatgcacctgccttggccttattataagtggaaagtgacacatgcagctcttccacagctccattctcaaaagctacctgcaaatagtattccttacgtatgccatccgaaacataacgatgcctgcctactctacgggtcttcttatgtgtttccacatattttttctgtaccatcactgtttcttcgtgtgtggaagcaggatcggcaaaccaataattaccgccaagaaacaagacataactgatggcaccgatgcaagccagatgacacaaacaattaattactttaccatccatggttgtcagccatatccatttcttatagaatgggatagtaacaagagcaatcaaaagcgccattccaagaggtatccaccaggcagtcagtgtatcttcgtagataacatatccaatgccacacgaagcaataaatatcagaagcatcaaaaagcgaagtatcctaataaatagagttttcatcatatttctttcatttatacgcaaatataaaaataagctactgaaaacactgattattaagaaaaatacttgattcaacctactaattcatgattaatcaaaagccttttgccgatatatcaagaccttttgattttccatcataactgaaattcatgcttattgtatctcctaataaaatgacagctatacaatcattcttttgtgaaagaaagaatatgactaatatgtctggaggatgttcctaataaaatagaatattgaccggaattcactttccaatcatgcgtttcatcatcccagaaagccaaatcctctggcgttatttcaaattctacagtttgattctctcctgaatttaaaaatatcttcttaaaccttttcagttctttctcgggacgcaacacagatggttgattttctttgagatatagctgtatcacttcagctcctttctgacttcctgtatttgtaatagtcaccgaacatcttatcatttggtcattcatttttttagatgacaaacgtggtttagtcaatgtaaaagttgtataagaaagcccatacccaaaaggataaagtggttctatattttttgtatcataccatctatatcccactaatacactttctccataattcacatcatacacattgataagatgctcatttttaagttcattatagagtgacgcccctttaggtaagtatccccatgctggtgagtcctcaaatgttttttctatagtcattggtaacttaccagaaggagttaccttacctgtgataatatctgtaagtgcttcaaaacccgattgtcctccataccacccgtaaatcaaacccgccaatcgatcattccatgcagacatatcaatagctgatcccgtattgaggatagcaatagtattaggattatttttagtgacatatcgcattaatgattcatcttcttttggcaaagcaaatggacgttctattgcttctttatctcgcgtacccatacttagcaaaacgatgtcagcctcttttatatcagctacagtaggcttttctatataatacactgttctgccaaaagctctctgtaatgcttcaatcagacttacattattgtagccgattacttctgcagctccatagccacgaggtatttcatatataaacttacctgtcaataatatttttctattctttgttggatcaagtggcaaaatattatctctgtttttaagtaaaacaattccttcttctgccacttgtcgtgcaattttttcatgctcctgatacttatcaagcaaagacaagtcatatttggacctatcataaaatcccattgcaatacaagtagccaaaataggacgcaccatatcatctaaatctttttctgtgatttttttctgatggtataaacccaacacagattctccaaaattatatgaaccaggcatctccaaattctgtcctgatttaataactttctccaaattccacaccgaattccaatcactcattaccaaccatttaaatcccaatttttctctaagaatattcttaataacatatgaactttgcccagtccactctccatcaatttggttatacgaggtcattacagacatagcacctgcatctattcctgccttaaaaccaggtaaatagatttcattcatagctcgttcgctaatgatagaattactccgtttacgataaaattcggtgttgttcccatagaaatgcttcaaacaagccgctgtgcctgtactttgaagtcccgttacatattgacttaccatttgagatactaaataaggatcttctccaaaatattcaaagtttcttgcacattgagattgtcgataaatatttaatccaggacccaacaaaacttcgatacctccggctctacattcctcaccaatagcttttgcatattggtaagatagatctggagaaaatgtagaggctaacaatataggagaaggaaaagctgttgagcgttccaattgtttcaccacattaggatcaggcaaattatttcggatatttactccttgtgttgcatccgacaagtaaatgggaagtatccctttctcttcgaatcctttaataaagaatttattatatcctctgaccataagtgccttctcttctatcgtcaatcgttccaataagtcattcgcctttttatatgccgcagttgcgtccattatttgttgagcatatatcccaatgcaactaataaacataaaaacaagtgagataatttttttcatattatgaaaactctttaatgtagaactcctctttataatagagaagttctacctattaatatttaattattatataattcttttatttcactttctgataatattctttcgtacaaaataaaatcatccagataaccatttaaaaagttttcaggggcaaatgctccattagtaaagcgataattacaaccaatgtaatatggccaattatcaactactttgtcaataacccctttcttttcaataactttttctccgtctatataaagataactatcccttttgccatcaactttttgataaacacaaacataatgatgccattcaccatcatccatccgttttccttcatattcagcccagtttccagccttacctttatattctacgcagaacacaacagttttaccactagtatcaagtctgaaccaactttgtcttgggacaggatcagtatatgtagcaccaggaccaacaccttgatggaatatagcattctttccagtcatatttgaagtcttcacccagaatgcaacagtaaactcactctccgtatagtggctctttaacccttcttcaggaatagacaatattgaataattttctttatctccctggaaatgagcagcgaatctacattcagcactttcgccagaaaaacgtgccggagcattatagacatttgccccagttcctcctataagttcttcagggttcaattgattgggacctatatctttattatcaccatcgaatggtaaatataacactagtttttctgcagaaatgacatatacgtatccttctttctcttttacggaactgttcaccgagtttttggccgttaacgtcactttatattttccaggatttacatactgcaccacaggattctgatctgttgaaacagaaggattacctccttcaaaagtccatttccagtcttccaccattcccaatgttttatctaaaaagtgaatatatcctccggcatatgtattccggcattgtgctccaaaatctgcggcaatcgcattcttatcaataacagtgatataatccaccattactttatcagaagatgctttcggattttttgccactaatttaaccgtataaattcccggagagaacatcatttgtggattttgttctgttgaagtaataatttctccaccttctttaggagtaaaactccacaaccattcattaggatagcctttagataaatctttgaaagatataatatcttcatttgttgcagtagtcttatctgcagagaagttggctgttatctgagatgggtagttgacagtaatatattgttctttcacaatttcattaacattgcttcctcgtccaacagacaaaatgacagaataaactccaggtttattgtacacaacactaggactgaataagaccgaagtctccggttctcctccatcaaaatgccagttccacttagtcggttcaccggtagaagcatctttgaaagtgacactttcacccattgtgacttcctgaacattcgattcaaatgctgcctgtaatgattgcaaatcatcttcagaacaagcagacaatactatcataacgacacactgtaataaatataaaacttttcttttcatatcagtgatatattaaattcattgtattttattaattctaattctctcaaaactaatcttttcgtatagctttgagctgccattttcatataaaattcctatttcattatcagagaacattacgatatcagaataggcgaagccccactatatacgacatatcctgccgaccatgttttaccattatccgcacttttctttatactcatatttatgcgtgttaaacttatatctgtattctcctgcacatcagaacaggaaaataaaaacagtctgaacaatatgtattgacaccaattcattgtatcgattttatactgacaactttaaaagccaatccatctgtatatcttttttctccaccttcatatataagagcaatctgtgaatcagagagttcaaccaaatccgaataaccagagtttccttcatacacaatatattgccctttccaactttttccaccatcagagcttttcttaatagtcatattaatacgttctgtagcagaagctgcatttgagagaaaaacagattgtcctattgatagtatactaccctgacatttacaatctatttgatcgttgctagcttgaggattagaccacgttataccaccatcctgactaatactattttttcggtagaatccttcatccgctctcatattcaacattaaagttccctctcctatttcagcaacagaacattcgccaacaccactaaccggagttggttcacctggtttccatgtctttccgtaatcatcagaataaataatatgcgaataactttttacttttccattttccctagtagtaaaatagtttggagcaattaaacgtcccctattggtccctttctgaatttgaataccatgacaaggtccagtagcgtaccaatcccatttttcttttttcacagcagaagttatctcaacaggagatgcccaagtgacaccgtcatcatccgaataggtataatacggacgccgagtgttttctccggttccattggttattgttccccacttatctgtttgataattccatgtcattaacaaatgtattctacctttatcatcaacaatcggaacaggatttccacaagtattctgcccatcatcccatatcattatttgtttactccatgtttttccattatcagacgaacgcttaacaacaagatctatatctccactgtctccattacttctagcttttctagcctctgcaaatgccaataaggtattactctgcgtcttaacaatagcaggtattctatagacttcatatccgtctactccctgactatagacataatcgaattgggatgctggaacttcctcttcaggtgaaggtggaaccggagtatcttgtgaatcatcatctttttgacaagcctgtgtgaataggctcgtcataagaaatatacatgtcagaatcttataagttttcatatccttgggtttgtttcagattaggattaatattcatatcacttagtggaattgcgagatataatggaataataatattatcaatagctttctttttcaagttcggaacttcctgatagacatctattgttccaccaaaatggaatctgagaagatcaggccatcttttcctttcaagatataattctcttgcacgctcattcagaatctccttttccactacttttttatccgtacttccattataaatacctatcttagcacgatccctgactttatttaactcaatgatagcctgcggtgtctgattcaatgctgcataagcttcggccttgaacaaatacatctctgcaagtcgataaatgataatatccgaatcataggtacgatcaccttctgtttttgtccccttcatcttattatcgaaaataccgatctcatttcctcccgcatccttagctattataaaagactcttttgttctaatatcagtgggattagcattaaaaagatctattaaaaaagagcttggtgcataagtactgcgagccccaccttttgcataaggtatttcatctttatttactgccttttccacaaatacatctcttggcttcaaactttgactatattgggcttccttttcataaatctcaaagtgaatagtccatatcacttcttttccatatttagtaccataaatatcggcaaaattgtcttcaaaagaaagacctttacttgctaaatcagcataagtgataacatctttcaaatcctgctcagaaccattcaagactttcgctttccataacaaaatatcggctttcagtgcataacatgccggttttgaggctcttccttttccattcgtataactttcttccgggaagagattgattgctgcattcacatcacttagagcccgttctaaaacttgctctgccggctcccttgctaatttaggcttattggaactttctgtcggttccagttctataggagcatctccccatatacgagctacacagaaatacatatatccccttatgcaatatgcttctgccaacagcctgtttttatcagattccactccaaaacttattccaggagtatactttaataacatattacaatgctgaattaccgaataataacttgaccaaccatatccgttttgtgaagtcagattctgcgcccacaaattcgatggaccaccttccagacctgttgtaaaagcatctcctctatcttcaaaatgaagagttgaattagaagtatcacgtaacttagtataaatacctatcaaatagctttctacatccccctttgtattccagtacccgtctcccgttatacttgaaactgtatctacatccaacaaattgcatgaatgtaacaaaaacaatgaaattcctaataatattgatttaatttgtttcataattacaagtcttatttaattagaaattaatttttactcccatattatattgtcttggccttgggtataccccataatccactccggtatatatttcaggaaacataccatcatatttctttatataacctatgttatatgctccagcaaaaacttccactccactcaatcttatttttctaacccaagttgatggtagcatatagcttaaagacacttctctaaatgccagataatctcctttactaaaatacaggctattgttggtactcccactttcagaactgcctatttgattatcccatctcatatgatttcgatattgataatcgtaatcactttgaactgtatatttaggatatttcgttccatcattcgcactttgccaggaattggtcattgcgtcttttatggcattattgttattacgtgaactacccattatctgtcctttaaaaccattatctatcacatgtcccatagcccagtccattacaactcgtacagtaagtcctttatatttgaaagagttgacaatacctcctaccttatccggtcggatatatcccatgaatttcatatctttagagtccaattgcccatcattgttcacgtcttcaaatatggcatctcctgcatgtttctttctaccttgcgcattaggatcattaggggctttagctgcttcttcttccgtttgataggttcctaaataatgaaacgcccatcttccaccaaacttttcgccctcagcaattcccccaacctttttagtacctcctgtagcaggatcataaataaaattacctcctacccgatttttctcttctccattatccggtaaatctactacgattcctttattgtaagcaaacgtcaatgataaatcccatgaaaaatctttggtttgaataggagtagcattcaactctatttctattccggagtttcttactgaaccataattactcttaatcgaactaaagcccgtagaattccataaaggttcatcatacaatctatcaaatgtcagtttattatagtagtcaattaataatcccaatctattattaaaaaatccgagatcgactccgatatcatacgattccgtcgtttcccatcgtaattgagaattttttaatgttgtatttagtatacctactgatccttgataattagtatctgtaattttgtactcacctcttgaattggcaacactcaaattgttattacccgtacgcccccaacttgcacgccatttccaacgactcataatactttctaatggcttgaagaaattttccctatgcatattccatccagctgatactccagggaaaaatccccatttattatcttctgcaaaccgtgaagaaccatctgcacgcatactgacagaaactatatatttacctttataatcatagtttacacgtccaaaataacttaaagtagcttccattgtcttagtagaacttgctctttgtgtactatctgccgttgcatttaatgttggaattaaatctatagaagatccactaccgcttgccgaaagtctgtaactataatcatgagtataactggcacctgctacagctcctatattatgctccttgattttcttatcatacgaaagaaccaaatctccctgcaaatgtctgtcatagttatgcttagctgaagcaggacggattgtatttccagtcgtctcattatctgcctgaaaataattctcaataccttcagttccaaaataataggctgttggttttaaaactagcccaggtaaaatattccagattgcacccaactgaaaagttgtcctatacacactagtatcatcataatttgttttataataaatctcatgcaatctacttctgaaagaagaaataccttctccgggggctggagttccatcttcatagtacaatctgtaggtcggtggtgttaatatacttcgagatatagtattgactgtatttccacctcccacagcatctctaacctgcagactagctttagtagacaaactccatgcctcacttaatttataatttccattaaataagacactataatttttataatttgtacctctaagtataccatcctgattcaaatatcttaaacctacataatagttaatcgcctctgttcctccactaatactaagatcaacctcatgcttttgtcctgttgtgaaagttgctttctgaaagtcattatcctggaagatgagctgttttcccgtaacagggtccgccatggtttgccagccctcatgttccagcagattactcacataaccttgaccatacttttgcaaataaacatccaaaaattcaagtgtatttttagagtttctcggatttcctgttgacataccaaaagaaccacttaagaattttgcctgatcttcctttccattatatgtcaaatcagcctgattaaatttcgcaatattagaacgggataatgttatataatcccgtgcattcaatagtggaattctctgcggttgttgttccactccatacgtataccttaaactgacagtaggtttccctttctgaccagctttggttttaaccaagattataccattagcagctctggaaccataaatagcagtagaagcagcatctttcagaacttctatcgattctatatctgcaggattcatatctgatatatttctaaatccttgtgatattataccatcaataattattaagggagtatcactttcaggtgaagtagaactacctccacgaataaatatttgagggtctgcccccggttgtccattagatatttgtaaggataaacctggaactttgccttgtaattgtaataacggattctgtcctggtgctttttgaaattcctctttatttatcttagaaatagaatttgttattaatgctcttgactgtttaccataaccaatggcaacgacttcatcaagtaacacagaactctcttccaaaacaatcacaatatttctccgtcccttaatatcaacctcttttgtttccattccgacaaaagagacaatcagagttgcattaggaggaaccattatagaaaattcaccggaagcattggtgatagtacctttatccataccttttacggatattgaaactcctggtaattcaactcctgtctggtcttgtactacaccagagacctttatatcttcagaattaatattatttgcttgaatatttgaaaatacagatgataagataaataccatcgataatattaataaatctttagtatgctttattgagtttttcataaaaaataaaattagaatgaataaattatataaggattaatctttcatatcaatcgttttaggtcgcagacaagtgaccaaaatgaccagcataacaaatactagtatagcaagcaacgcaaaatcgcgtcccaaatgtccggcatccatcgactcacccagaaggctcgtaatagtagctccggcaaatacaccacacatattcataataccataggcagttgccctgtaacgtgcagacacaaactgacagagaataggcatattatttgcgtcaaacataccaaaacctatcccaaacagcatagcccccatcaccagtgcgaaaatagaatgaccatatccgataaacaacaaggaaggtatgataagccccaaacccatagcaccagtatatactcttccacgtacattttttaatacccaacggtcggatatatatccacctgccaacacaccgaataatgaggacaaagctatagaaatagtagacataggacctgctaccgaaatatcaatagataagctgtcagagaaaagagtcggtaaccagttctttgccgcccatcccggggtgcccggtacacagaaataaaataagataatccagaaaaagacattggaaaataacattcccaaactcttcaatacaggaatctttttcatcttctgattttctgatacacttcctctctctttatcacgcagaagaaatgccagaataacaccataacccacacctataataccaaaccaatggaatgttgtatgccaggaatagattgctgcaaaagtagccccaaatccaccgatagcctgtcccacatacaacccctgtcatatgtattcccacagccaacgaacgagtcttgtctttgtgaaaatcggcaatcaatgacaaagcagcaggcaaatacaacgcttcactaattcccataattccacgcaaccagtagagttgattgaaagtggtggcatatcccatcaagtaagtaactcctgaccacacacacagactacctacaatcaaccatttgcggctcatacgatcaccgacaatccccgataaaggactcatcagtccgtatacccacaagaatacagccatcaggcgaccgaaattggctgctgattccaattcccgcacatcctccatcattggaattcgcatagtggaaagcatttgcctgtccatataattcaacaaggcaacaccccacagcagcccaaccactacccaaggatatatatttgaagttttattattcatgtccgtttactttaaaatctctattaaattgatttttataaaagctaaatccgactgactactctcatataatatacctattgaattttcatctatggatgtaatgcaggaatatccggcactacgatattggtcgaaaagaatccaatgttcttccggccaagtcattccatcatcaaaactaacttttaaagtcagattatctcttgtcccataattattcggatttacaaacagaagcatgcttttcttctttccttcttccatatactcatgtcgatgcagacttgccatacaagtaggttctacgagtgctctccgtgaagttggatgttctttccaactttctcccagatcaatagttgtgcagattctacgaccgttcacgtctttatttcctctgttccggttatcacgcatgttcaacatcaaggcgccatcacccaattgtacgacactacattccgtaacatcctgatatgcaggattactggtcacccacgtctttccatgatctttactatacgtaatattcgagaaaggaagcccgttttcgtcacgtccttgtgtaggaaataccaacgttccgtctgtcaacgtaattccctgtccgggtgcaggtgcaaataaccaccattcagggcgtttcgtctttgaggttatattatccggaaagccccagctaagaccatcatccgtactttttgctatcataaactgggaagtttcttttagccctgttcctggttgagaacctctacctttccattgatgtgtccagttcgtactgttttcattcagaccttctatccactttccgtctttatccagcagaccgtgcatccataatcctgctacataaatatcaccagtatttttatctactaaaatacaggcatcactcactccattgtatttctgtggtaaacctccccatttccccatatccaaaacagtttgaatgggttgccaagttactcccttatctgtactacgatgaagagcaatatctatatttccctgcaaatcacgaggataatcatagcgggcatcaaaaatggccaataaagtgcctttattactagtagctaatcctggaatacgtgatgagatacatccatcctgtcctttctgtcgtacagctactcctactcgtaaaggtttacttgttttatccaaaattttcagattgcctttcgtggttttcactcggttacaattaacctgaacacgatgatccagtgaaaccgtatctttcaacgttacggctacccaaaaagacaaagaatcctgattaacctgcacttcattagtaaatgacattttttgtgtagcgggaagtgcattacaaagtaaacgagacgtatctatcagtccatttttcttcgcaccatatatggcaacagaaacaatatctgccacattcgtgctccccaataaatccagatctatttgccggataacataaggttgattatctgtcctgattaaagttatcttcattacaggatttgccggtttctttaccaacacaggaataacaggtctctccagtacccattttatgtctttacctaaagatgtgactggtgacaccgataacaaaatcatcgaaaatatgataaatattttcttacttactttcatagtatctttattttaggtaattttgaacgcatttaactagattggaggggatagacagaaagtaaagtagcttaccccagcaatacacttttactgtcatctcctctttattattttcagaattcaaagaattttatagcgtccaaatcacctcttagtttttcatattcatcaacagaaaaaggttttatcggcaaccggcaagaaccgcaatcaatacctatcagcttcataatcgctttgccaccgcgcactccgccaccatatttaataataacctccacggtacgtatggattttatctgattgtggcgagccgtttccaaatcgttcattttcattgaatcaaaaatagcctgatagacattaggtatataattatacgtacttccaactcctgctacagctcccatagccaagccggaaataagaatttcatcataaccatgcaatacttcaaaccgatgttgctccaactctatgcaaactcccatctccatcaggttattatgagtaaacttagtacccaccagattaggtattttctttttcccttctaccaaaaacttatccaccggcaaattaacccctgtaatcgatggcatattataataatagaaaggtaagccagcagcagagtggcaaataggtgcaaaaaaatcaactaattcatctactgttcccggtttaaaaaaagagggagcaattgaagcaatagcatcggcccctacttgtgcagcatgacgtgccagttccattgcacttcgttgacagtttgagcctacatgagctatgaccttgaatcgcttacgggcagaaacgagccatttttcaagaattaatttacgctcatcgatcgtcaatgaagaaaattcaccggttgtgccgcacacaaatacccctttgataggagtcgatgctatccaatcagcatatttatcaataacagataaatttacgtccccattctcatccaatggggtgaaggtggccgcaaccataccttccagtttttcataattgttcatagtgcatttaattagattgttattttactttattttcagaaagttcctttcaaaattaagggagttcgtataccaggttgtatttcaccgcttaccacgtaaacgtcattccccatataaaccgcatttgtcgtaacaggaataggataagggcagtctaaagaatccaccaaagaatttgtttctgtactgatgactcgtaacttacggctaaatcccggatgctcgggagatgtaggtagtatttcttcaactcctcccagtagtattatcttgtctttttcatatggaatagcagtccccgccattacaggaaaattaccagctattttgctccatttcctgctacctggttcatatacgtacccctccgtatattctaccatcacttcattcggagcataactccttccactaaaaagataaaatcgtcctccctgaaccacacttaccgcataggcgagcgatggtccctcccaaccgggcatcttctgccatcctttttctttatgcaataaatcaagcatataaaaatgattggtcgactgttcatttgtcatagtttcctgccccccagcaatataaatacagttatccccaatagcccccgttgcatttgccaacggaaccggtaaagccggataactaacagaatctactacaaatgaaacgccctctttttttatgagaaaaactttatcgctacattgcatacgatcgcatcctccaatacataataacccttccggcaagcatatcgaaactccataagctaatgagctgttaaggaaatcatcataaacagtccacttatccatgtgcagatcataactatataaagtagaccaccaagttttaactcctccctcccaaggatatttatcaggaaagttggctcctcccagcactagtaatttatcctctactattcctgagtatgcaccagccaatccaacgtttttcagcataccggtacatcccggaagtaacaatgagttttcccattgcattactatcttattttctccttttctcgaacaagccgtattcatatatgataaaattaaagataaatataaaataaaaaaatacagttttctcatatactatctatcctttcttcttcgtttttctctgccatcaattccagactccggttcactttaaaaatcttataaacctcaaaatgtctttcaatggcatcacgatagcctttctcatctccttttcttataaaatccaataaatcagcatgagtagctattctgccgcttttactcatctctatatttataggttttaagtagtctttgaacttttctttcacatagacaagaataggatgaatgatttcctgaaattcagatattattttatttcccgtaattttgtatagttttgtatgaaaagccgattcgctgattaacgcatactcgttattctcgaaaacaattcccattttcacaatctcgctcaattcctcaatatctttaggagttatcttacggaaaatatcacttgatattcctatttcaagtgcgattctgaaatccaataaatccaaaattgtttcttcactcaaaacacgaggatctatcactcttttcattccacctaaaatggaaggttcagtcaaaaccattcccttacgagggcgcgcatgaatcagtcccatcattttcaaacggctcaaagcttctctgacaacacttcttgcaactcctaattctgcggccagattattctcattgggaatagaatctccacatctcaaatcattctttttaaagtaggtaagtaagctgtcttctacctgatcgatcaatgttgtttgattaatttctatcttcatattactagattttattatttgtattatttgtctgacaaataatacaaatgcaatattaagagattttttttagaatacaagggcattataataagaaaatgcacatttatgttgaaaaacatacttttagtacatattgagctctcatttagaacaatagcaagagcagagatactcattttaaacatagtagcgatatctacttattatagtgaaggcataaattcataagataggatacccccaaaaataagcaattaaagatacagacaaaatcacatataaaaatctaggttatgtctattgtatcttttatctttgcaacaatcaaaaaaagcgattatatgagtcctgattcagaatatacagaaacacatgagaataaaatctatgccactcttgacaaactgggaatagcgtatcaaagtctacaccacccagccataatgactatggaggaaggagcagaaatagccgctaggttgtacttcatgcaaaagtctgtttctgactaataaacagcaagaatacttcatgctcttattgcccgcaaataaaaaattgaaaacaaaagaacttgccggacagataggtagttcccatctctctttcgcttccgaaaaggcaatggaaaatctcttgtgtacttttccgggggctgtcagtattctaggtcttatctacgataaagagaacaaagtacagctcctgattgataaagaaattcttgaatcaacatatataggatgtcatccatgcgtaaacacatgcagtctaaaaatcaggttggaggacattcttaaaatactattgcccaaaatcagtcatcagaattttaatatcgtggagttataatccgaaattacaaagtcgtacattctgcaaaaaaaacgaacatttaagctagtttcacgacttaattaaagtacatgtcttgttcctcggtgagaaacacatcgttgcacaccgagaaacgggtcgttccttttaaaggaacggggctttggttttaaaccaaaaaacaagccatataatcaactaaatatcagcgtattaccagattgttattccaactaataagcatatttgaattttattgggttcttcgtcaaatttggtggtaatctcttttttatttcaactgtcttcttctttcttaatcctattaaaagttgtagatatgtttgctttttagtaactttaaagacaccacatcattaagagttacaatgcaacaagtcatatctacaacgtacaaatatacatcaaaaaaagaaaatgctcctacaaataggggattattccatgatttcagattcagtcttggctacgataatctgcaacaagatggtatctctgaagctgttggctcattgacggtctttctacatacggctggcaaaggggcttcctgtccttattgcggacatttcagtcaccgattgcacagttactactcccgtcatattgaggatcttgaagtttacggtcatactttggagttagtcatcaaggttggcaaatattattgtgacaatgtttcttgtccacaaaaaatattctgcgaaccgttgtcttttctggctcgtcggtatggtagacggagctatcttgttgaggaacgcatcagatcgataagtttggaacttacttcccgaaaggcctcttctcttttgcaactgttccatataacagccagtagttcttcctgcttacgcatcctacaacagtgcggacaacacaatcctatgcataataaaagtatttatgtaggtattgatgattttgcctataaaaaaggtaaggattatatgagtgtggccgtagaccagatgacacacatacctattgctttgttagaggatagaaacggagaagcacttgataactggctcatccggaatcctcaaatacaatatataacgagagaccgtggaagatgtttcacagaggctataaacagaataattcctggtgttacacaaatctgcgaccgattccatctaatcaagaatatgacggacacgatgataccggaaatagagaaaataatccgtcagaccaagaaaaagctcaaatacgaatatcctgacagagacacggcttcttcgttaattcttcaggacatatttaacatgggagatgtccgacacagagaaaaattgaagatatacagggaaagcttgaacttaaaaatgcaggggatgaccattgagcagacagccacacatttgggtaagaaaagtcgctacatttataagattattcacaacagaagaataggggcatacttgaatgagcaacagaagacagctcttaaacatgtatccgaactggctacaatcattagtgcgggctgtattactcgaaaaatattggcacaaaaaatggggagtaaaatcagtggcgcacttattggaaggataacatccagcttgcgaaaaaggtatcaacaaaagaggaaggaagtcaaggagcataatgagagcattgaaaacagaagtaaaatacagagagtttcacagaatcagatacgcaaatacattctaaagggagaatcggataatcctaaactagcggaactgtataagtcctcaccgcagattaaagaacttttaagcgtgtgtcagaatttcagagatatgattaatgggaacacttatgataaggatattagaaagtggattgaaaaagcgaaggcaacacggaatatggcactgacgaactttgcatatggtattgaaaaagactgggaggcagtacaggcagctattgatatccccttcagtaacggattactggaggggacagtgaataaaattaaagcggtaaaaagacagatgtacaatagggcaggaattaaactactgagagcgaagattatttattcacaatagaagaagtaccaccaaatttgacgaagaaccttttattgacaactcacgataggatgggaatgatagaataacagaaaggatagaaaaattcattttaaacatggtgacggtatccacttatgatagtgacggtatattcgtgggatagggtaaccatcccgaccggatagtgacgctatgtttttgctgggaaaagaacataaaaaaaggctatctatcccagacagccaatcttttgttaaccttaaatctaatactatgaaaaacacattgcaaagatacggactttctgcatatctccaaattttcaggctcaagtagcgtatcttataacatggtttaatagaagtaacagtttcgttaacatttaacataaatccatcggatattaacgaatatccgatggagtagattcagagattactcatatcgcaatgaacgagcaggtttgctcattattattttcattgtctggaaagccactgtcacaaatgagataaacagcatcagcaatacaggtactataaagaaccacgctttgagatcggtacggaaagcataatggcttaaccaggcattcatactaaaccaagctaccggaagagctataacaactgcaatcaaaatcaactggaaaaatcctttgaccaactgatagaaaagattccagcgggaagctcccaacactttacgtattcccatctctttggtgcgggtggaacaggaaaacatgactaatacccaaagtccgagacaggaaataaagattgccaatccggtgaacgaaccgatcatcgctccgaaaacctcgtcttgccgatattggtggtcgaagaactgatcgaggaagaaataatcaaagctggaatccgcgaaatactgattccagatctcttgcacttgagataccagttcacggggatttccggaagccatcacaacagagatataacgctggggcaaccaatcaattttatctttatgaatcagcatgataggtgtatagttcttgctcaacgcctgctgatgataatctttcaccactccgataatctgcatcggcgcatcagtacattccactgttaccaactcgcctatcgcctcatcattggaagcaaatcccagattacgtacagctgtttcattaatcaccagtttatcgacatcatcaccatattcttcggagaaacttcttccggctactatctgcaaaccgtatgcatccgcataatcaggatcacaagccagcatctcataaagacggttctgcttcaaagcgtcattggtgcgacgattggaaaggaatgtggccacttcttcgcccggcacggcaccggaaaaagtaacccgatggaccagaggaagacgcgcgattgcttttttcattgcttccaacttgatattctgcccctctgtatgtcccggaaacttaaccactaatgtctggctggttttcactcccaaagattgattgcgcataaaattcagctgtgcaaaaacaatcaatgtaacacaaagtaaaatcatggaagctgtatactggacaaccaccagtacctgacgggttcggtcgcctgacttgctatgcaaaaacttccctttcaacaaggttataggtttgcgattcaacaaagccaatgccggataatacccggaaataaatattccggctataaaaacgagaaccagcaaaatccaccagtaatccatgaaccagacagaaaacgtaactgtacgtcctaccaattggttgaaatgtggaagaaccagttctattaatcccacagctaatatgaaagctatcagattcataaccaaggcctcaaacaggaattgataaatcaactgttggcggaaagctcccactaccctgcgcactcccacttctttagcacgctccatcgaacgtgctacggtcagattgatatagttaatccaggcaataaccagaatagcgacagccgcaaaaatcagggcgatcatagcagaacgatttcctttggtttccgtctcatagcctatctgtggggtgagatgtatatctgccaagggaattaaagacacgccccacgtcttatttttcagtgcttcctctgtcttgtatttctccgccatcacaggaaattctttttctatctccgcttttctttccggtgaatcgagcaaaacatacgtataggcttcatgcttataccagtattcctgcatatattgaggcagagaggcataggaaatcagaaaattataatgaatgtgtgagttggagggcatttctttcatgactccggtcacttcgcacgatactttatcatacgttccggtaaagatcagaattttgccgatagggtcttcatctttgaaatacttacgggcaatacgttcggtgattaccacttgccggggcatggagagacaagtctttttatcccctttcagaagttcgaaatcaaaaagacggaagaagcccggatcggcataggctatctgattctcccgtaatgtcagttcgccatatttcacaatctgctccggttggagatgggtagcgatacgggtataatcttcgattccggcaagattctctttcatggccgaggcatatccgaaagagctggtcgcccagtaatcggtcaggacttccccttcatgaaaagtgctttgcacccgatagatatgggcatatttcgtgtgcattttatcaaagctgaactcaaaagtgacataggttagcatcagtaatgccgatgccattccgattgccaatccaaagatattgatgaaactgaacttcttccgcttcatcagattccgataggcactattccagtaattccctatcatacggtttcgtttttagatgacgttttcttttccagcggacggttgatgttttcggctacaatctgtccgtccaatagttggatgacccggtgtgcatacttcgcatcccgctgtgagtgggtgacgataatgattgtggttccctgacggttgagttcgctcaacagttccatcacttcgatgccattcaccgaatccagatttccggtaggttcgtcggccagcagtagtttacattcggtcactacggcacgggcaatggctacacgctgttgctgtccgccggataactgctggggataatgattcgcacgatgtaacaggttgactttttcgagcactttattgactcgttctttccgttggagagtcttcatacccagatagacaagtggcagttccacattctcatacacggtcagttcgtcaatcaggttgaaactctgaaagataaagcccagattgcctttccgcaaagcagtcaactggttttcagtcattttatcgacttgcttcccctcaaaaaagtaagaaccggaagtcggagaatccaatgtaccgagaatattcagcaaggtggatttgccgcatcctgacggtcccattatcgctacaaattctccttgttccacctgtaaggtgacatcattcaatgcttttgtctgcacctcttctgtggtgaaaagcatagatagtttttctgttttaatcataataattattcattattttagtattagtttctcattgtctccaaataattcatagccggatatgattactttctcacccggagacaaaccgtctgtcacctcgtaatacagtggattctgccgtcctatcttcacagggcgccgcgtggcaaatgtaccactttcatcgacaacgtacatccatcggcccccggtaatttgaaagaatccgccacggggaaccagaatagcttgtgccggatcacccaattgcaggtttatgtgataagtctgtccggcacggatattctccggtcgttcggatataaaattgaggtctgtacgaaactgaccgtctttcacttcaggataaggtttagtcacttccagtttataggtttctccgtcacgggtaaagtcggcaggaagtccgggaagtacccgttctacgtagtgctcgtctatctgtgcctgtactttaaggtcggaagtgatgatttgcccgatatgttcgccggcagaaatagattgcccgatttgcgcattcaggtttcctacctgtccgtcgatcggagctttcactttcaggttttccaaacgctcacgaaccaatgccaagctccgtttcatattacgtatattctcgtcaagactgcctatctgactttcccgaaaaatatgatcctgccggatacgttcgtcaataacagccagttgctctttggctgctatatattcttcctctgcctggagatagtcttcacgtgctatcagttgttcgtttaccaaacgtttatactgctcataacggcgttgcttcccgataagctctttattcaggccaatacgttcttgtttcagttgcagtcgttcctgctccatactaatccgggtattacgcaactcgttttcctgataagcaagatcggcttcactctgcatgataccgatattgagcaatgggttgctaagacgcagaatcacatcaccggcctttaccatagctccctcttctttcaggcgctcttccacacgaccgccctcgatggcatccatatagataatccggctaggcatgacctgaccaatcacacggatataatcactgaactcggcctgctcgacagtagcaattgtcagccggtctttctccactgccatagaagaggctgtatctctgaaaataaaataggcaatcacagcaagtccgagcattaccccaccgacccaataaagacgtttgcgattgatgccgggttttcgttcaataagtgtatccataatggtttataaaaaagttccttgtcgataatatttttctagtttcatcatcatttctatttgcaagcgtacacgaaccagttctgctttggcagcaataaaccggttacgggcttccatcagttgaaagacggaaatcaatccctcttcccatttccgttcggattctttcagtaccagtgtttcagcgtcaagttgtgataatgcctgctgatgttcactatatccggtgtgaagagaaaggagtgtttgctcaatatccgtatataattgttgtttttcaagttcttcttcgtttttgagccgatacatattcaatttcagcttgcgctgattggtcaaacgttgcaaaccgcttagcaggggaaaggagatgccaacacccacatattttcctatattatcacgcaattgtctggccgagaaagctgtattataataattggaaccgacggtgaaacgagcaaagacagagggtgagaaagctcctcccgctatcgcatactctttatgagctgctttttgtttcaaatcaatcatacgtatggagggcaatatttcgatagattgtgcgtatagagtttccacagtcgaaacagaatatggtggtaattgggatgctgtaatcgtatccagaatagcgagtgtgtcgcccggctggatattcattaattgtttcagatgcaataaagcgatccgactgctattttcgcgcgactgataacgataaatatctccctcccggcgtgctttcacctcctgtaaatcggaagctgatttcaatcccagttccacgaagacctctgtctgtttcaaatacctttcgctcaaccgactttgttccaaagcaagatcgagcaattttctctccagaatcagtttgtaataagcatccgtcacctgataggccagttcattctgtttctctttcagctcccattcactacgttctttgttcattttccggaaacgcacctgattgatacgcgaaaagccttcaaataaggaaagtgtcatatcaagtcccaccgttccctcttcaaaagattcactggtatacccattggtgtcaggatccagcgaacgtccgaatcgtttgcctgtttccgcattaaccactatgtgcggcaggaaagcaccgacagaagctatataatccgctttcgtttcctttatgccgataactccgttacgtacagccggattctgtttataagccaaacgaatgcaatcgtccaaactcatagcggattgggctagcaggaaaaccggcactgaaagcaatagtagtaaaagaaatcttttcatcctttataatatatgattgtgtgatagcaggatgataaaagcaaatgcaatgccacaaatcataaataattgattataaaacaaatagaaattacataattcttccaccgtccaaaaattaaacgccctaacgtccaataattggacattaccgagagaatccctctattctaccctattctaactcgttctgactcattccagcataaactttgtatgaaaacgtctaattattggacactcccttgcaaagaaaatcaaaaacagatacctttacccggaaacttaaaaggaacattcaacggacagagcccccaatcttgcgtatggaaacaggaacgattttaattgtagacgacaataagagtgtattagcctcactggagttattactcgagaatgtgttcagcacagtccgcacagctgccaatcctaatcaaatcacgaccatcttatctaccactccgattgatattgtgattctggatatgaacttttcagcaggaatcaacaatggtaacgagggactgtactggctgaaacatatccatgaaatccgcccttcactgcccgttattatgctaaccgcctacggtgatgtagaattagccgttaaagcactgaagaatggtgcaacagattttctactaaaaccatgggataaccacatactgatacagaaaataaaggaagcctatcaaaacaatcgtccaacccatcataaaaactctcccaaatcaacccagaaagcatccggtgatgaaaatctgaataagtcagaaatgttgatcggtcattcccctgcaatgctacagctaattaaggtagttactaaaatcgccaaaaccgatgccaatatcctgataaccggagaaaacggaacaggaaaagagatgttagccagggaaatacatcgcttatcttcacgaaacacccgtcagttacttagtgtcgatatgggggctatcagcgaatcgctctttgagagtgaactcttcggacacgaacgtggagcgtttactgatgcttatgaaagccgtccgggtaaattcgaagccgccaatggtggttcgctttttatggatgaaatcggaaatctccctcttgcattgcaggccaaactactgactgtactacaaaaccgaaatatcacccgaatcggaagcaacaaagtgattcccgttgatatccgactcatctccgccaccaacaaagacataccggagatgattaaagaaggtttgttccgcgaagacttattctatcgcatcaataccatccatctggaaattccccctttgagagaacggggagatgatctattattattcatcgatgcttttcttcatcgcttcgcttccaaatatcaacgaccggaaatgcgaatgcatgagcaaacgattgaaaagctacgcttctatcattggccgggcaatatccgggaactgcaacacaccatcgaaaaggcggttattttatgcgaaagcaacgtgatacgtcctaaagatattctggtgaaacagacttggaaaccacagacagtccaagcggtgcccaatctggaagaagtggaacgacaagccatcgagacggccatcttgcaaaataatggaaacctgactgctgcggccgaacaacttggtatcagccgacaaacgctctacaataaactgaaacgatttaagccctaagccgtatgctattcagccgacatatatacctcaaatccgcaactacgcgcctaatatgatacagaagcgaaaagaatctgcatcgttagtaaaaagggggcacagtgcatcgaatgtcaccataaagacatataaatgccccttaccccaccatgcgacttgaggcaatacgcaaaatcacgactataagttgtcggtgttatccaaagtcattctggaacacattggcataagcattgttgcatgaatagatattcagcacatacttccttgatgtcctgacccatttggctggcacagagatgaacttaaagacaaacgtcttgatgcggcttgttgctttgagtccgaacctcttcacgtcaagcctcgccatgatgaatttatagaagttgcgtatgagtgccataagcagaagaaacaccgtgttttctcccataaaggattttggaagcctgttccagccgaatccgttattcatatcatcgaagatgcgttccttccctccacggaggttatagaattcgacaatctctttctcggaagactcgtagtcatttgtaaggatgcagcggtaggtgtattctccttcccacaggtcgagttcgccgtctatccgcttctgtctttgaatcacaagacggtatgccttccctttccatttctcgatgagaatggaggccagctcaaactcaatgccgcccaattccactttcttccaacctctgagggcaaagatgtcattgtagagcgaactgcatcggttagcacggatatagaaggtcttgcagtgtttagcaatctcttccactatctcttcagaacacgagccgcaatcagctctgaaacggttgataataagcttgttttgttcaaacctttcaaagaacctcttcagcgtgtccttctggtggaaacggacatttgtgttgccgtcgctgttctcaatgccgacaatcaagttgccaataaccgccacgccagggcgataaccaaggaacttcttgtatgtaggcttcgcatcaaacttctcagcctctatgaactggtggtcgaagtcaacgtcatacccctcgccctctttcagctgccctgtggacaataggcaattgaggagcagtgtattcagcttgtctgccgtgttgaagtcgtaggtcttgccagtgtcggatgtgtaggaaatgttatcctgggtcagttcctttatggctctaagaatcgtgtcggcactgcatgtgcgaagtgtcggatgaagcgaaaggtggtacatcagatgagtggtgacatcctcgatgcatgagccgccacaaaaataaacgctcataagcgaacggatgatttcgctgtattgataaccatacagcctgcatctcataccgagggttgagtcgattacagatgagagtctggagtcaaattgctccattattgaaaatattcctccaaaaggagtgagtttctcggatttaattgctacctttgccatgtctgtcgggtttgatacatattttgatttgcaacactaagataggtgaaaaatctgacatggcaaattcctgagcaactttttgttgctcaggtacttaaaaagttatatttgtaatagtgttgcggaattaaggatatattggaccacattaggacatatcctatttattcttgctaccgcaggaacaggtctatggctcattatttcccaacaaggagtggtaatagggatattactggttatctgctccttgtttcagattggaagattagtgaataagctaaactctttcaaccaaaaattacgccttttcttcgatgcgatagaagacaaagacaatatgctctatttccccgaaaacaatgtcagccgggaacaggaaatgctgaatcgttcactcaaccgtatcaatgccctgctcatccgaactcaagctgaatattcaaagcaggaacatttctaccgttcgctattggaagaagtccctagcggtgtgttggcatgggattcttccggaaaaataatgatggccaacagtgccgcactgactttattgggatgccagcaactagcccaatacgaccaactgaaacctatcctgcaggaaaaagagaagaaagaacgacttagtctgtctcaaaaccagatgaaattacagaacgaaactattaccatcttatccatcaaggatatcagcaatgaactgaatgataaagagagtgaatcatggaacaagctaagccacgtgcttacccacgaaatcatgaacaccattgctcccatcatctccctgtcgcaaacattatccgcatatccggacaacagcgaaaaaacacttcgcggacttcatatcatccaggcacaaagtgaacgcctgctggaatttaccgaatctttccgtcgtctctcctatctgccccaaccggaaaggaaacggttttcactaacagccctcctgcaaaatctgcaagaactcctgtctaccgattttcaggaaaatcagattcatttcacacttacctgtcagccggaattcatcgacatggatggagacgagaaccagctatcccaagtcctgctcaatctccttagaaactccattcaggcgttagacggaagaacagacggagcaatcgaaatttatgcatatcgggacgagcatatatctatcgacgtcacagacaatggtcccggtatccccgatgaactgcaggaaaaaatattcattccgttcttcaccaccaaatccgaaggaaccggtatcggattaagtctctgccgacaaatcatccgtaaccacaacggtcatttgtctattttggaaagccgtcccggtaaaacaatttttcatatcgacatttcactgtaaaacaaacctttcacggccttcgagtgtttattatcatataaacgaattttacacgatatgagcaccaaagaacaatactggaaatattccctcattgtcatcatcctgtttatgggagtcatcatcttccgccaaatcactccttttctggggggattgctgggagcactcaccatctacattcttgtacgcggacagatgaatcatctggtagaaaaacgaaagctgaaacgaagcatcagcgcactgttgattaccgcagaaacgattttcgtctttcttatccctttgggattgactgtctggatggtggcaaacaagttacaggatatcaatctggatccacagacctatattgcacctattcaacaggtagcagaattcatcaaagagaaaacaggatacgatgtattgggaaaagatacgctgtcattcatcatgtccatacttccccgtatcggacaaattataatggaaagcatcagcagccttgccatcaacctgttcgtcatgatctttgtgctttacttcatgctgattggaggaaaaaagatggaagcttatgtcaatgacattctgccatttaatgaaaccaatacgcaggaagtcattcacgaaatcaatatgattgtccgttccaatgctatcggcattcccttactggctatcattcagggaggcgtggctatgataggctatctgcttttcggagcacccaacatactgatgctgggattcctgacctgctttgcaaccatcattccgatggtaggtacggcattggtatggtttcctgtagccgcttatcttgccatcagcggagactggttcaacgccatcgggctttttggctatggagctatcgtcgtatcgcaatcggacaaccttatccggttcatccttcaaaagaagatggcggatacacatccgcttatcactattttcggagtagtcatcggcctgccgatattcgggtttatgggagtcatcttcggtccgttgctgctttcattattctttctttttgtggatatgttcaagaaagaatatctcgacttgcgaaataacctcccatcgagatgacgaaactaccgaaaaattgtgtacttttgcggctgtaaaaacgacactaaaatttgatggaaacatttacattcaatactgtcgaactgattcttttatcggtggcaggtattctttttatcattcagctcatttattatttcggcctgtacaatcgaatacatgtccacaataaggctgtaggcaaagaagaggtgcatttcatacgagaactgcctccactttccgtgattctctgtgcacgcaatgaggctgaaaatcttcgtaaaattctacctgccattctggaacaggactatccacaatttgaagtgattgtcatcaatgatgcttccacagatgataccgaggatatactgggagtgatggaagaaaaatatcctcatctttatcatagttttacgcccgaaagtgcacgctatatcagtcataagaaactggctctaacgttaggcatcaaagccagcaaacatgactggctcgtatttacggaaacaaactgtatgcccgccagcaaccagtggctaaaactgatggcacgtaatttcactccgcagacccaaattgtgttgggatatagcggatacgaccgcacaaaaggatggttgcacaaacgtactgcattcgatactttgttccagtctttgcgctatctgggattcgcgctggccggaaaaccttatatcggtatcggacgcaacctggcttaccggaaagaactattctttcaacagaaaggtttctccaaatacctgaatctgcaacgtggagaagatgatttattcattaatgagctagctacctcctccaacacccgtgttgaaacagacttcaacgctaccacacggatacagcccgtatatcgctacaaagattggaaagaagaaaaggttagttatatggctactgccagattctaccacggaatacagcgttacctcctgggatttgagacattctcccgtttgttattctatattgcctgtatagcaggtatcgtattcgggatacttaatttccactggctggtagcaggcatcgcattcctgatgtggttactgcgctttacagtacaagctgtcattatcaaccgcacggcaaaagaaatgggtggaggacgaaaatactatttctcgttacctgttttcgaccttatccaacctgtacagtcattgaagttcaaactctgccgtttcttccggggaaaaggagatttcatgagaagataaaccggatttcgtgagaagacagacttattgttaaatcaatcgctgcatataaatagcatccgaaccatcgtgataatagcatggctttattccaacaggaataaagccatttttcatatatagcccgatagcggaagtattggtcactttcacttcaagcgtaatctttgcagccttacattcaccggccgtctgaatcgtctggtccatcaatacctgccccagttctcttcctctataatccggatgaacagctatcgaatagattcttaaatagcgagttcccccatgaaataacagggagacataagcgatcaccctatccgcctccatcatcacatagaaaattcctttcgaacggcttatcagataggcaaactgctcttttgaaaaactgtcttcccggaaacactcccactctatttccaaaatagcgggaatgtctgcctgctgtgctttacggacgattatcggctccataatcaataatgttttgtttctagcacttgttcaaagtgattcaacaaacggtaatacatttcatcaccgataatggcatcttccagtccatgatcgatgctcggattgtcattgatttcaatcacataagccttatcatccaccattttcagatcgactccatacaacccttttcctatcagattggcagcctttacagctgtatccaataccacacgaggcacctgataaataggaatcgtatctaccaatccacaacggcttctgcccgaatcatagtgacagtaaatctgccagtgtcctttcgccatataatatttgcaggcatagagcggtacaccgttcaatagaccgacacgccagtcaaactccgttggagtaaatgcctgtgccagcaagatagccgatttttcaaacagtatcttcagactggcttgcagttcctcttcgttcgacacttttttcataccaatggaataagagccatccggtattttcaggataaaaggagcacctaccagttcgcttatctgttcaaacgaatgatggttggattgaaaaatcaatgtagacttaggagcagatatcttttccttctcaaaaagttctttcagatacactttgttcgtacaccgaatgatagacaacggatcgtcaataacagccattccgttttgtgcagccaactgtgacaaatggaatgtataatgattgagcgacgttgtagtacgaataaacaaggcatcaaattcgagcaaacggatagcatcatcttcggttatcatctccacatggatgttcattttcttagctacctccgtcaatttgtgcagagcacctttattgctgggaggaaatttctcctgtggatcgaccaatacagcgagactgtaacgggaagcctttgccgacttcggtgcacgccatattttcttgttaaagttatccagcgtattggcaaagaaatcctgctctgcatcattaagctgattcaggggaagaaaatgaatgccctcgatctgatttctgggatgagtattcaaagccactcttaacaatgggcaagggtaattctcgaaaataaaacgcgcaatccgttccatacctttttcccggcatttgccaaagtagatattcaggtaccagatatcatccttgatgtcattcttctgtatccattgataacaaagggcttgcagactacggtccatccgcacccccgttccagcctccattttgttgatgatatcaacatccggaatgactttctgtcctctcgtttgggctagcagcgaacagtaatacccttcagagttatagctgtaatcattgctaagattaataactaacttccggtctttctccaccggcttgttttttagatagtcggaaacagtcaggacactacttgtctcataatacggtttccagtcatccagattatccaacagaattaacacattattcataatggttaaaaattaaacctacaagaggatattaagtaaattgggcgcaaatatagacatattattcactccacatcacgcaatggaccaaattatttttgcagtaaaaatcagataggaaaaaagaggattattcgtatctcatggagcttgccggattgatcttagtgataagaaatgaaggaccaatcaacatcaatacagatgcacacaaagtgcccaaattaatcaagataaaaagtaaaacattaaaagaaactggaacagtatctacataataagtcgccggatcaagtttaaagaatccgaattgagactgaaggatacagaatgccaagccaatggcattgccccaaaacattcctttgccaatcaaaaagactgcaaaccaaagaaaggttctgcgaatcgtgaaattattggctcccaatgcttttaaaatcccaatcatattggtacgttcgatgataataatcaataaaccggaaatcatggtgaagccagcaactcctatcatcaaaatcagaatcacccatacgttcaaatccaataaatcaagccaagcaaagatttgaggattcagttgttcgatgttacgcacataatacacacctcccaactcatcttgcctgttgtcaatatcagttgcgatctcataggttatatcttccagtctatcataatctttcacctgtaattccacaccggtcacctgttccggttgccaaccgttcaaacgattcaccagattaagatccgtcagtaaaaagaggttgtcgtattcggagaaattcgtctgataaattccggcaatcgtcaggcgacgagcgcgaatatcatcctgtatataataggtatatatcttatctcccagtttcaacttcattttagttgccaacgctttcgagataagtacttgattggtagaaactgaatcactgaaaacaggaatctccccttctaccaaatactcttttataaaatgggggtcaaactccggacctacacctttcaacaccattccttgaaaagcgtcatcggtcttaatcatacccggtttggtagagaaacgctgcacatggcttatctccggataatcagcaagagcagtcatcatactgtctcctaccacaatgggatgggtttcgtaagaactgaccgcatccaaattagttatctggatatgcgacccgaatcctataactttatttctcacttcacttttaaacccgatgactaccgccactgcaataatcattacggccaaaccaatagcaatacccgccatggcaatgaggaccgcaggacgtgacacctgctttccgccatcgctttcacgatagatacgccgggctatgaaaagtgataaagacatttgtttaagtattaggtattaagtattaagtgtagcagcaacaaacaccccagaaactacggttaatacttaatactagaatttattccgttcttcccggatacacttccaaagccttctgcaagacaaaaagtgcacgggttaaatcttcttttttcaatacgtaagcaatacgaacctcattgattccagatcccggagtggtatagaaaccggaagccggagccatgaatacagtctgaccttcatactcaaaatcagaaagacaccatgcgcagaacttatcggagtcatctaccggaagtttggccactgtatagaaagctcccatcggaatgggcgaataaacaccgggaatacggttcaaaccgtcaatcagacatttacgacgttctacatactcatcatacgtttcgcgtgaatattcttccggagcatccaaagaagcttctgcagcaatctgtccaatcaacggaggacttaaacgagcctgacagaacttcatgacagcatcgcgtatctccttgtttttggtaatcaacgcaccaatgcggataccacattcggaatatcgttttgataccgaatcaatcagtactacattattttcaataccttccagatggcaggcagaaatatatggagaaccggtatatataaactcacgatatacttcatcagagaaaaggaataaatcgtacttctttaccaagtcacgaatctgattcatttcacgacgtgtatacaaataaccggtaggattgtttgggttacaaataagaatcgctttcgtacgctcattaatcagttcttcaaacttctctactttcggaagggaaaagccttcttcaatggtcgtagcaatagtgcgaatctttgctccggcagagattgcaaatgccatatagttagcgtatgcaggttccggaacgataatttcatctcccggattcaggcaggaaaggaaggaaaaaagtacggcttccgaacctcccgatgtaatgattatatcgtctgctgtaaggttgatattgaactttgcataatatcccactaatttttcgcgatagctacgataacctgcactggggctatattccagcactttacgatcaatattgcgtatcgcgtcaatcgcggcctgaggagtgggcagatcaggctgtccgatgttcaggtgaaacacatggactccgcgttgcttggcagcgtctgccaaaggagccagttttctgataggagatgcaggcatctcgtttccgcgaatggatatggttggcataattttaactacaaattactaattactatttactttttctacttggagctgcaaatgtacgcaataatttgaatacagagacataaaaactttaaaaaccttagcaaggttaaaatcgttatggtaaattgaaaagaaagctatacatttgtcatacagaaaacttaaaacaatatcataatgaccatacaccttatctcattcgcttcaatacttcacaaacaagtctcgctacgtagctcgcacgaagctattttgagcgagattgaaaaatattatactgtaaagttcgtcgaccatcaagatatggacaaacttagtagtgacgatttcaaaatcattttcgtcgctaccggtggggtggaaagactggtcatacagcactttgagaatcttccccgccctgccattttactggcagacggtatgcagaattctcttgctgccgcactggaaatttccacctggctacggggacgcggaatgaaaagtgaaattctgcacggtgaattatcggctatcatcttacgtattcatacactttataataattttcaggcacaacgttctttgtttggcaaacgtatcggagtcattggaagtccttcttcctggttagttgccagtaacgtagactacttgttggcaaaacgtcgttggggaatcgaatatgtagatattccattggaacggatttatgaacaatttaaacacattacggatgaccaagttggagcatcatgcgcagctgtagcatcacaagctcttgcctgccgcgaaggaactcctgaagatttaatcaaatccatgcggctgtaccgggcaatcaaaaaggtctgtcaggaagaaaatctggaagcgctgacattaagctgttttaaactgattgaacaaatcgacactaccggatgcgtggcattatctttattgaatgatgacgggataatagcaggttgtgaaggagatcttcaatctgtatttacgctattagcagttaaagcacttacgggtaaagacggatttatggcaaatccttccatgattaattcccgtacgaatgaactgatattggcacattgcaccgtaggtctcaaacaaacggagagatatattatccgcaatcactttgaaacagaaaaaggaattgccatacaagggctacttccgacgggggatgtaacgatcataaaatgtggcggtgaatgtctggatgaatattacttgtctacaggaacattgactgaaaacactaattatattaatatgtgccgtacacaagtgcgcatccacatgaatactccggccgaatacttcttaaagaatccactgggaaatcatcatattatgcttcatggtaactatgaagatacgttgaacgagtttttccaggcaaatgcttgcaagaggacggaataaaggcatctataaaaaaagaaagatttatgataggagaaatttcatgtgctataaatagagttgaagagcaaatagagcaactctttgacgagaaagaggagtttatcatggccaatgaagatgtgctacctagaactatgtatctgaagaagttggctgaaattgattcacgaatagacgagctaaaaaagacattggtttcgttgaatgaagagaaacaagagattctggatatggaataacttatcctatgggaatatcttcccatttccccccatgccattctaccaccgaagtaaaacctgctttcttcaaagcggctaatccttcgaagcgggcattgtttattctttcagggtagtgcgcatcactattcacctgtacccgaatacccaattctttcaggaaagggaaataacgttcattcggatagaatgtacccagctcatgataagacttggtattgatttccaccatataaccacgtgtagcaatcaccgcgaagtaatcgcggaccaacgtgtcataccatgcttcatcaagcaaacccggacgataacaggaagcgttataatgcatcttgtcagcatggccgacaatatcaaatcctcccagctctaccatacggagcaggttcttataataaaggtggacaacagaatccaagtcaccatcgaagtgcctgtctaccaattgacggaaaagatctgccggggtatcaatatctacgattttcccttccggagaatacaacatatgcacagaacctatccggtagtcaagtggtagtttttgaaaacaaggcaaagagggattgttttcttcattcaggtagtcaatttcgagaccgatggcaagctctatcttacctgcatatttctttttcagacgagagaattcggaaaggtaatcttccattctatcccactccatcgtccatgcggtagaaaatggtagtggagcatgagaagaaatgccataagaagtaaacccttcgctgatagcaaaacgaataaaatcgtccatattggctcgtccgtcgcaatacaggcagtggctatgataattggttaggtttgtcatactaggttatattgtctgggggtatattatcattatttggttatccgggaatataataaactatacttgtgccatcgaagtggcacaactgtgccagcatgttggcactgctacgccaaagaggtggcacaaaggtgccaatatagtggcacgaatcagccttctatttcgctaagttccaaccaacgcattgtcttttcgtcaatcatatcattgacttcgggcaaacgttttgacttttcagtcaattcgtcaacggaaagtgtgccgctacaaagaagttcctcaatttgtgttttttcagcttccagttcggcgatttctttttccagttgctcgaattcacgcttttctttaaagctcatcttacgcttgtcgttcagacggacacgggcggtcttttcttcctgcggcttctctgcttctttctctttttgttcctttgcttctttccagttacgataatcactataatttccggggaagtcacgaatatctccctgtccgttgaataccatcaggtgatctactactttatccataaagtaacggtcatgggaaacgacaatcacacagcctttgaagttttggagatattcttcgagcacattcagcgtgataatatcgaggtcattggtaggctcgtccaataccaggaagttaggattacgcatcaggatggtacaaaggtaaagacggcgacgctctcccccactcaatttatagacatagctatgctgggtttcaggagtaaacaggaaatgctgcagaaattgagaagcagtcagcttctttccattgcccaattcgatgacttcggcaatatcctgtatcacatcaatcactttcatctgttcgtcaaactgaagtccgtcctgcgaataataaccgaaacgaactgtttcgccaatatccactgttccgctatcaggcttgacttgtcccatcaatatcttgataaaagtagattttccggttccgttatttcctacaattcccatcttctcataacgagagaagatataagagaaatcatccagaatctttagatctccgaaactcttgaaaagatggtcagcttcaaatatcttgcttccgatatacgatgctttcacttccagctttacattatcagtattaaaacgctgcttcgcaaccttttccaattcgtagaaagcatcttcccggtaacgagccttatgtccgcgtgcctgcggcatccggcgcatccagtcgagttctgtacgatacagattattggcacgctctatttccacgctcttagattcaatacgttcctgacgcttttcgagataatagctgtagttacctttatattggtagatttgttgattgtctatttcgataatctcggagcaaacacgatcaaggaagtaacggtcgtgagtcaccatcagcaggctaaggttggtacgacgcaggtaatcttccaaccattcggtcatatccaagtccagatggttggtcggctcatcaaggattaacagatccggttcggtaatcaaagcgtttgccaaagcaacacgcttcagctgtccgccggacagttgcttcactttctgatcgaaattacgaattttaagttgtgaaaggatttgcttggctttctgttcatactcccaagctttctcctgatccatacgtgccaagaggttttccaatcccggatgaccttcggtttccatgcagcgttcgtactcctttatcaattccaccgtgctgttaccatgatggaaacaggcttcgagcactgtcagttcttcgggatattgcggatcctgttccaggtaatccacccgaagatcacgacgaaaaacaatattaccgctatcataaccttcctttccggcaatgatattcagtaaggtagtctttccactaccgttctttgctattaatcctacccgctgaccttcggcaatgcccaaagatacattttcaaaaagaaccaagtcaccgaaagacttggtcaggttatctatctgtaaataaggtactgccattttaatccaaacacttcttatattcttctattacattgcaaggttctcctgcctttactttactccaaacgagcttcatcggatcgatggtccgatctttatattggagaacaggagcttcccggttgccgtcgatcaacgttttccattccatgccatccacttcatttgccagaattgcacaaacagtgataccaatggctaaccattcgtctttctttttcgagccaattttgccgttgtcaatcacttgctgaagtttttctaggtcttcttctattccctgaaaatctttcttcaattcctgtttcacggtagacaccacccattcatatccctcattaatcaaataaatttcagaaagacgtacaggaatcaattcagcaggatacttctgcccttctttacgtacctccaaagtagcgattacatcttccgcctccttcacaactccacctttaggcacggtgaaagaacattcaaaagcaatatcgtcaacgcctgtaatccacaaatgggaagtataataagttccctcctcctgaaacatttctttgctatacgcacattcccacgttccgactttcaccaatgaagccgaatcgttctctttcagttcctgccggatggcatctttgccataaccggcttttcctttaaatgcggatatacgaaaattccccgtccatacatcgggattatagaaaagaaaagagccttcgccatcttcaaactcattccagtctgatggatagttcatagaaaaccatgctccgggagagataaatttcttgccttgcatccttttactttaaaatgattacttggcaaaagtacgaattaaatacgaattacaaaacatcatttccctattggctgtattttcctccgcacatctttagaaatctccagaaacatataattcaatttcccggaatgaataccttcttcgttctccttatacttcttattagcatattgcttcgatttctcgaaagtcaatagcgacatttcattctgcgacttgcctaccattgtggagtccagctgttcatccgggaaaaagtcatccagatcgacatcaccaatcattgttgtttccaggaagttcttatcagtatgtgaattatcggtataataccccacaaacatgtgtcccggcgtacgtaccagaataggatcgatatttatagcccgaagcagtgatgcaaacagtacgctaccgtccacacaattaatctgcgaagattccagtgcatcatcaaacgtacgaacccgctgcgagaaaacaacattgctcgaaaggctggtgttggaaacagaactataacggaatttgcgtttctgcaatatattccagagagcatacacctgcttgtccaccgcccctttagccttactctgatagcctaagaagcgattgacaatacgagtattcagtgcttcgcgaagcaactggtcaatcatcggattctcttcattgacataggcagcaaagaaaatacttgtatcatggaatttggttccattcgatacataccccaacagacattcattgatactgcgcacagagaatgtacgcacccgttgccccagatcttttccattcatctcgacagtaatagccacacttaccggttctgcctgcacctcatttttcagagcttcatagttccagatgatatcaggataaatcgtatattccgttcgaggcttgtttagtacaaattccgacaccgaacgggagaaaaaaggcgtttcagccacttcaatccgtacccggctataggctgtcttcgacttcacccgaacagcaatacacgatttcggattccccaaataattagaatccgacggaacaatcacctgcgcatcagtagtggcaacagacaaaatcgctgaaggaaatatatttccgcccagatcatccacaatttcaaaaccggaattgaatgaagtatatttaaacacagacataccgccaaggagaattaacagtaccaccaccgatcctattatttccttccgatgccgttttaagtcaatttttatcattatttgtagtttctataatcaaacgtttctattgtatctcgctaacaaagataacaaatagtgagcggtttttcctcttacaatcaacaaaaacttccatattcctcatcaattcccggaattcccggaatgtaacacgattgtaacgtctgtttcatctgcccgtaacaaagtttcctcatctttgcaaaggataaaataaaaacgtaactttgtcatatcacattaatacatatatcttatgaacgaaacccgtattctagttgtcgacgatgaagaagacctctgtgagattctgaaattcaatcttgaaaacgaaggttatgaagttgatactgcaaactctgctgaagaagcaatgaagatggacatcagcagctatcacttgattctcctcgatgtgatgatgggagaaatctccggattcaaaatggcgaacatcctgaaaaaagacaagaaaacagctaaagtgcctattatctttatcacagcaaaagataccgaaaacgatactgtgaccggattcaacctgggagcagacgattatatttcaaaacctttctcgctgcgtgaagtcatcgcccgtgtgaaagccgtattaagacgcacagtgacaacggaaacggaaagagtccccgaacgtcttacttatcagtcgctcgttattgacatcacaaagaaaaaagtaagtatcgacgatgaagaagtgccattgaccaaaaaagaatttgagatcttgcttctgctggtacagaataaaggacgtgtattttcacgtgaagacatcctggcccgcatctggagtgacgaagtctacgtgctcgaccgtaccatcgacgtaaacatcacccgtctacgtaaaaagattggggtatacggcaaatgcattgtcacccgtctcggatatggatactgttttgaagctgaataaataattatgccgaattaaatagttattatgaacctgcctgtaactcaaaagcattttctttcttttagccgaaaacttttcctttcggttatttcactattcctggtatttgccatttgttttattgcgtaccagtatcaacgtgaacgggaatataaaatagaactgctaaacaccaaactgcaagattacaacagcaggctctacgaacaactggagaatcaacctcttgacagtgaaatcatcgacggttatatcaataaccatatcctggaagacttgcgtgtaacccttattgatgctcaaggaaatgttgtttacgacagctatccaagtcataataaccagatggagaaccacctgaaccgtccggaagtacagaaagccataaaacatggcaacggatatgatgtacgccgtacttccgagacaaccggagttccctatttctattcggccactcattataaagattatattgtccgttcggctttaccttacaatgtcagcctcatcaacaacctgcaagcagacccgcactatttatggtttaccgtaatcgtgaccttattattaatgattatcttctacaaattcaccaacaaactggggacttccatcagccagctccgtgaatttgcgatgcgcgccgaccggaacgagcctatcgaaatggctatgcaatccgccttcccgcacaacgaactgggagaaatatcacagcacatcattcaaatctacaaacgactgcacgaaaccaaagaagctctctacattgaacgtgaaaagctaatcacccaccttcaaatctcacacgaaggactaggtatatttactaaagacaaaaaagagattcttgtcaacaatcttttcacccaatacagcaacctgatttcagactccaacctggaaacaacagaagaagtctttgccatcagcgaactgcaagagatcattcattttatcaataagaatcagcaagaacgttcgagaggaaaaggtgaaaaacgaatgtctgtcaccatcaataagaacggacgaacatttatcgtagaatgtatcatcttccaggatgccagcttcgagatttccatcaacgacgttacccaggaagaagaacaggttagactcaaacgccaactgacccagaatatcgcccatgagttgaaaactcccgtcagcagtatccaagggtatttggaaaccattgtcagcaatgaaaatattccacgcgagaagatcaacgtattcctcgaacgttgttatgcacaaagtaaccgtttaagtcggctattacgcgacatctccgtactcacccgcatggatgaagccgccagcatgatcgacatggaacgggtagacatcagtgtgttggtaggtaacatcatcaacgaagtatcgttggagcttgacgaaaaacatattacagtcgtcaactccttaaagaagagtatacaaatcaaaggaaattactcactactttattccatcttccgtaatctaatggacaatgccatcgcatacgccggaagtaatatccagatcaatatcaactgtttccgtgaagatgagaatttctactatttcagctttgccgacacaggtattggagtatctcccgaacatctgaatcgtctcttcgaacgtttctaccgggtagacaaaggtcgttcacggaaagtaggtggaacaggactgggattagctattgtgaagaacgccgtcatcatccacggtggcagcatctccgccaagaacaatcagggaggcgggctggaatttgtatttacattggcaaaggagaagtaaaatcaggagttatcctgcaaaacttgtctaatcaaaaaaactaacagaagagaacgcagcaaaataaaaggaagaaaaattctttgaataaagtagaaaggacattatctttgtcaccaatgtaatctacataaattcaatgtaataattgttagttatgaaaacaaacatccatattcttccagctatatgcatcctttgcctttgtgcctgcaaaagcggcaacgcttccagtctgaacaaaaatgatgtaatacaagacaccattaaaacctttacattgcctgccatccccccaatgatgacagccccggaacaacgggcagactttctggtaaaacactattgggataacgtcaacttcgccgacactaattacatccaccaccccgaagtgaccgaacaagcttgggcggattattgtgacatactgaatcacgtcccgttggaaactgcacaagaagccatgcggaaaacaatcgaacaaacgaatgtagacaaaaaagtattcacctacatcaccgacctggcggataaatatttatacgaccccaactcccccatgcgtaacgaagaattctatattcccgtattagacgccatgttagcttctcccttgttagaggaaattgagaaagtacgtcctaaagcccgccgggaattagcacagaaaaaccgtatcggaaccaaagccctgaacttcagctacacattagcttccggcgcacaaggctccctctatcaacagcaagccgactatatcctcctattcatcaacaaccccggctgtcatgcctgcacagaaacaatagatgccctgaaaaacgcacctatcatcaaccgacttttgggacaaaagaaactaacagtcctctctatctaccctgacgaagagttggacgaatggagaaaacacctgaatgaattccccaaagaatggatcaacggatacgacaagaaatttgccatcaaagaacaacaactatatgatttgaaggctatccccaccctctaccttttaaacaaggaaaagaccgtgctcctaaaagacgccaccgcacaagctatcgaagaatacttaactaatgttgaattagagtaaaacgatacaaaaatgagggtgttcggagaggggtgtacaaagcgctgaaacgcccaccagtaaagggggaaaagccaatgaaaaccagtagagtagagaagagaagagtaaagaagagtaagtaaaagtattatttctgttataaacaacagcaataatactgggcagagaagatggctttggatgctgccgttgtcggttcggatcacttcgtcggtgccgtttctgttcccgtgtccctcatgaactgttcgtccggcagatgaccgacttttgtctggtaggttgttgatgctcgcccagtaggtaacggacattcacacggtagataacctacgtttgtacgttaggtaaattctatattatttcacgggctaccgtttcaatacttgtttgctaaagtatcatttgcttcaaaaccataccgaaatgaattagttcaaaaccgtatagtaaggaacaaaataggtggataccgctgcatccacctataaaaaacgaccaattatgtttcaataaatctgtttcatacgtccaacgttggacatagacaaagatactttttaaaagctaatcttatatcaaacaaataaaaaaaggcgggcaactcaatacccgcctctaaaatccgctaatttggtaaattttgtaataagtgacagtctcatttacaaaaatacagaaaatatcgaagagaacaagttggttctttctctttcgtatcaggacgaaagaaaaagaatatccccccaacttggaaaaaacaaataaactccctatctttgtcccgcattggtttgcgactcccttacgggggaagcaattaaaagggaatcaggtgtaaatcctgaacagtcccgctgctgtaagttccatgcatgttacaagcaattcactcattgccactggagaataatctgggaaggcgtttgtaacaggaataagtcagaagacctaccatgcaattatgtttcactgctttcgaggaaaaagcgttgagtctaatgaaccggacaagtcgtctatcatttcattcatcactctaattcagagaaagtgtgttaaaacgaataaactctgccaagtttatttatgcgtgtccggtcgaagggatttcgcccggacacttttaaatagcaacagactgaaataaggaataaatgaaagagagaacatttaagaaaatgatctttgcagtattctgctgccaattcttatccataccactttttgcacaacagcaaaaggtagatacgacacatacatattctattcctgaaataacagtatcagatatctatcagactcgcgaagtacgttctaccgctcccctgcaagtattctccaaagacgccctgaaaaacctgcacgccctgcaagtatccgacgcagtgaaacactttgccggagtgaccgtaaaagactacggaggtattggcggactaaaaacagtatccatacgaagcctgggagcacaacataccgctgttggctatgacgggatcaccctaaccgattgccaaacgggacaaatcgacatcgggcgtttctcactcgataacgtagacagactttctctaaacaacggacaaagcgataacatcttccaacctgcccgcttctttgcgtcagcaggcatcttgaatatccagacacttaccccacagttcacaaaagacaaaaagaccaacatagcaggagctttcaaaacaggttcctggggattagtcaatccctccctcctgctggaacaacaattcaataaaacatggagcatgtcagtcaatggcgaatggatgtcttctgacggacattatccatatacactgcgctatggaagtgcagaaggagatctgtcctcacgtgagaaacggaagaatacagacgtacaaacattccgtgctgaagccggactttacggtaacttctccgataaagaacaatggcggttgaaagcctattacttccaatcctcccggggactccccaaagctaccactttctacaacgaccattctacccaacacctgtgggataaaaacactttcatacaaagtcaatacaagaaagaattcagccaacaatgggtattccaaacctctgccaagtggaattggagctatcaacgttacctagaccccgatacaaagaactcattaaagaaaacagaaaacagctactaccagcaagaatattacctttccgcttctgtactatacagactgttgagcaacctctcattctctctttccaccgacggaagcatcaacaccatgaacgccgatctaaacaactttgtacaacccacgcgctattcatggctaacggcattcgccggcaaatacgtgaatgactggttaacaatctccgcatccgcattagcaaccattatcaatgaagatgtaaagaaaggcggcagtgccggcaatcaccgtaaattaaccccttatgtaagtgccgcattcaaacctttttataatgaagaattccgtgtacgcttcttctataaagacattttccgcctagcaagtttcaacgacttatattacgaagaagtaggaaacacacaactaaagccggaaaaagccaaacaatacaacatcggactgacatacaacaaaaatgtatgctcgttcctaccctatttgtcagcaaccatcgacgcttattataataaggtaacagataaaatcatcgcttatcctaccaaaaaccttgcagtatggagcatgaaaaacctgggacaagttgacatcaaaggtattgatgttacaggaagcctctccctccaacccggggaaaaaatccgcataaacctctcgggcaactatacataccaacgagcattagacgttaccccacccgatccaaacacgtatgaatcaacatacaaacaccagatagcctacactccccgcatctccgcttcggggcaggcaggtatcgaaacaccatggatcaatctgtcttactcattcctattttcaggaaagcgctacgcgttgggacaaaacattgccgaaaacagattagatagttatagcgaccacagtatttctgcaagccgtgatttcctgataagaaaagtcaccacctctttcagcttggaagtactgaacctgatggacaagaattacgagattgtgaaatacttcccaatgcccggacgatctgtaagagcaacaataaaaataagatattaaatattataaaataagatattgacgtgaaaaggaaattaatatatatattctggtgctggctgtcatcgatcttgttattcatggcatgtgatgacatggaagacaaacctttcacatcaggcattataggtgatccgacagaaacaggtaccgccgaattatatgtattatgtgaaggactgttcaaccagaataacagctcattggcacgtttctctttcggtaatcaacaaatggttcgtgattacttcaaagcagtcaaccaccgaggattaggagatacagccaacgatatggctatttatggaagcaaggtgtatgtcgtagtcaacatctccagtacagtagaagtgatagattttcgtacaggaacctcattgaaacaaattcagatgcaggcagaaaatgggagttcccgccaaccacgctatatcacttttcataaagaaaaagcatacgtatgttcctatgacggaaccgttgcgcgtatagacacaacttccctctccatagatgctatcacaacagtgggacgtaaccctgacggcatttgtgtacaaaacgaaaagctatatatttccaattccggcggattggattattcatcagggctgggtgtagataatacagtatccgttgtcgatattgccacattcaaagagagtagcaaaattatagtaggcccgaatcccggtaaaataatagcaggtccggatgaaaccgtctatgtagccacccgtggcgaagatatagaagccggagattataatttcgtcaagatagactgccggacaaacaaagtcactcaatgtaacgagaaagtgcaaaacttcgccatcgacggagacatagcctacctatataattacaactacaccacacagacttcttctatcaagatgttcaatctgaaaacagaagaaacaatccgtgagaatttcataaccgatggaactgtgataaagacaccttacggtatcaatatcaacccttacagcaacaatgtatatatcaccgaagcacgcgattacaccacttacggcgacttactttgtttcaaccaacaaggacaactcatgtttcgcctaaacaacatcggacttaacccgaataccatcgtattcagtgacaaagcctcacaaagcaatattgacgacaatgacgatgacacggaaaaccctctagctttcgccaataaagtatgggaataccgccctgctcccggacaatttatcaatactaccacatcagcatacaaggatggatttacctacgatgaaatattggaagaagcaacccgcagaatccagcaaaaatcgcttattacattaggaggattcggtggctacattgttttaggattcccacagcccattccgaatgtaacgggagaatatgacttcaaagtaagaggtaatgcttactacaattccaaaaccggaacaggaaaactgggaggaagtgccgaaccgggaattgtattcgtatccaaagatgcaaacggtaatggaaaacctgatgacgaatggtatgaactgaaaggcagcgaatacgggaaagatacagaaacccgagaatatgaaataacctattaccgtccgaacctagccaaccaaaatgttttctggaaggataataaaaaaaacgaaggatatattctccgcaacagttaccataatcaggaatcctattatccactttggatagaagatgatgaaatcacatttcagggaacacgcctaaaagataatgctgtcttagaaaatggattatgggtaggatattgttatccatggggatatgcagacaaccatcccaacaccaaggaaggcagtaatttcaagatagattgggctgtggacagtaacggcacaccagccgacttggatcaaatagatttcgttaagattatgactgcagttaaccaagacgcaggacaaatgggtgaaatatcaaccgaagtcacaaccgttgaaaacttacatttcaaaaaataatcaacaatttattaataactaaaattagaaaagaacatgaaaaaattatccttattattactattatcagtatttatattttgtggctgtagcgatgatgacgatacaaaaacatacatacttagcttgcctaattacgaaactcatacactcgacatgggcgatcaagaaaatccggatgattcatggtcagtaagtagtgagtggggaacaactaactataaatacaatctgttaactgacgcaagtggaatctttgaatttgactgtgtatcttcaacatacggtttctattcagatagctttgcatttacgaattgtacagtagaagattgtccagacttcgcaagctatgattatcgcgctatcaccaaaaaaggggtaatcaataatacatacgttatcgttggagctgccggatataaaatcggaaagaattctgataaagaagccgcaatacgattcagagatcacgacaaccctaatgaactggaagactatagagtaaaaggactatatgtaacaaacagtgtctatgcttatagcagtatgaaagaaggaactggatattatggtgaagaagaaatattcggaagcaacgactcattcaaacttactatctacaattatgataaaacaatgcacgtagattgttatttggcagaaggaaccaatctcctcgatcaatggaaatgggtagatctaacttcattgggagaaacgaaaggactaaaattctcattaacatctaccaaaaagaatgaatacggtccattgacaccgacctacttctgtcttgacggtatcactatcgaagactaaataaccactgctcgattgacctcaacctattatatatttatttttaatcagcctattgattaccaataatcaaacttataatcatactcaatcgaatgcataattttaaaggaggttgtgtcaaaacgctgacacagcctttttttatgcgcaaagcccagactttctcaagcccgggctttgttattacccaaagttttcgtatctttaggtataaagtttttcgttatggcaaagttacattttcgtccttacattcccaaccaaaccgttctttttccacaaagaattgatgaaaacatagctgcgaccgacccggtccgcatcgtgaatgctgttattgacaatctcaatcttgagagtttcaagaagctttataaggaaacgggccgttgtccttatcatcctaaaatgatgcttaaggtgataatctacgcctacatgaataatatctattcttgccgtaaaatagagaagcacctccttcgtgacattcattatatttggcttgccggtaatgagcatccggattttatcacgatcaaccgttttcgtaaccgtgtaaaggaggaaataaataatgtatttacccagttggttcttgtccttgccgataaaggtttcatcagccttgatgtggagtatatcgacggcaccaagattgaatccaaagccaacaaatatacttttgtctggcgcaagacagtcgaacggaaccgtacgagactaatggataaaatccgtattctcttggaacaggtggatgaagccattgcacaggagaactctataaaagacacatccgtggagtttactccctgcaggctctctgacatagtggatgaacttaaagaagccctggaacgccagcctgcaacaaaggataaggaagaaaagaaagccctgcgcaaaaagaagaagcaggtcatggaacttgaagggtatcgtgacaagctgatagaatacgacaatcaccttgatacccttggagaacgtaactcctattccaagaccgatcctggtgccacattcatgcgcatgaaagaagatgccatgaagaacgggcagaccaaacccggatataatctgcaaataggtactgaaaaccaattcatcacagacttccgtctgtttcccaaccctaccgatacactgaccctcataccttttttccactctttccagtaccgctataaccgtttaccgaatatctgtgtggcagactccggttacggttcggaagaaaattaccggttcatgcaggagaatgggatagaagccttcatcaagtacaattacttccataaagaacagcgtcctcgttatactcccaacccattccatgccgaaagtctccattacaatgcccaagaggattattacgtttgtcctatgggacagcacatgaaccgtataggaaccaaacgtgacaagacagcgagcggatacatcatcgaaagtgcccggtataaagcaaaaagatgcgaaggttgccctttgcgtggcagttgttttaaagctcgggggaaccgtattatagaagtcaaccaccgattaaatcaatacaaacggcaggcacgggaaaggttgctctcagaagaaggtatcaagcatagaggcaggaggtgtatagaaccagaggctgtgtttggacaaatgaaatacaacatggcatacagaagattccggcatgtgggagaagacaaggttacaatggactttgctttctttgctatagcctttaatatcaaaaaaatgtgtgctaaactgataaaagaaggaaaggggctcattacagttgccaaatatatgtttatgggactatttataacccgatataattggaatatagcaacttgttgccaaatgcatgaggaaaaagcagcatagccaaaagaaaatatagcagaactgtaaaatataaaagaggttgtgccaacgttttgacacaacctcctctttatatcttcttaccacaaattgatatatcactagcctacggagaaataattccatcagccacaacttacaaaaggtcatcatatatttgttaatcacgcatattttagctacattcgtcgttcaaaactattaaatctacaacaatggaattaccttttgctgaatcatggaaaatcaagatggtagaacccatccggaaaagcacacgtgaagagcgcgagcaatggattaaagaagcacattataatgtctttcaactcaaatcagaacaggtttatatcgatctcatcaccgactccggcaccggagcgatgagcgaccgccaatgggcgggaatgatgctaggtgatgaaagctatgccggagcaacctcattcttcaaattgaaagagatgattacgaaactaacaggatttgaatacatcataccaacccatcagggacgtgccgctgaaaatgttcttttctctcatttggtacatgaaggagacattgtgcccggcaactcacattttgacaccaccaaagggcacattgagggacgtcatgccatcgcattagactgcaccgtcgatgcagccaaacaaacccaactagaaataccgtttaaaggaaatgtagaccctgataaattacagaaagccctcacagaatacgctgaacggattccttttatcatcgtcaccatcaccaacaatacagccggaggacaacccgtctccatgcaaaacctgtacgaagtacgtgccatcgccgacaaatatggcaaacctgtacttttcgactctgcacgttttgccgagaatgcctacttcatcaaaatgcgcgaagaaggttaccgagacaaaactatcaaagaaatcacacgggaaatgttctctcttgccgatggcatgacaatgagcgccaagaaagacggaatcgtcaatatgggcggatttattgccacgcggcgtgcagactggtatgaaggtgcaaaaggcttctgtgtacaatacgaaggctatcttacctacggaggcatgaatggacgggatatgaatgccctcgccatcggactggacgaaaacaccgaattcgacaacctcgaaacacgtatcaaacaagtggaatacctggcaaagaaactggatgaatacggaatcccttaccaacgtccggccggaggacacgccatcttcattgatgcgcctaaagtgctgacacatgttcctcaagaagaattcccggcgcagacgctaaccgtagagctctacctggaagccggtatccgtggatgcgaaatcggttatatccttgccgaccgtgatccggtgacccatgaaaatcgctttaacggccttgacctacttcgtctcgcaatcccccgcagagtatataccgacaatcacatgaatgtaatagctgtcgccctcaaaaatgtatatgaacgcagagaaagcatcactcatggagtacgtatcgcctgggaagctcccttaatgagacacttcacagttcaattggaaagattataaacttggagaatatttgttcgcgtaaaacaaaagtgttccccaagtgtttatattataatcgaacttaatacgtaaaaattatggcagaagattataaattaatagacaacgaagaaaaacatcggtatgaatttcagatcgatggcaaaatagctgaaatagactatatcaaatcaaacaatggagaaatataccttgtacataccgaagtacccgcctcattaggcggcaagggagtaggctcacaacttgcggaaaaagcattggcagacatcgagcgacaaggtctacgtttggtaccgctttgcccgtttgtagccggatatattcacaaacatccggaatggaagcgaattgtaatgcgtggtattcatattaaataaatacatatatgggaaaaaaaattgaatataccaatggtgaactgaccattgtgtggcagcctgaattatgtcagcacgccggaatatgtgtaaagatgctacccaatgtttatcatcccaaagaaagaccctgggtgcagattgaaaatgcgacaacagaagaattaattgcacaaatcggcaaatgtccgtcaggagcattgagctatcgacttaataaaaaagagaaataacccaatagtgaaagacttcgcttgaaaggctttgaattcataaaaatgagattgcttcaaaataaaaaaatgaggcagtctcatttttcgttttagaaagacactacattcggacaatgataacacaccgagaaaagaacctcacacatttcctcgtccgttcaattcaatgtccacgtcaatacaaagtccggacaaatacgataaccgacagaataaagttcttgctgcgccgtaactaactcctgaacctgaaacgtcccctcctcttgaggaataaaatgcgtcagccggagtttacgaagatcagcatccgcattttccatccgcttgaaaacagcttcctttgccgaccaatgcaataacagcccccaagttatatctccctgataagattctacttgctcgtcaggacggacatagcggtcgcataccttgtgaacccgttgggcatattgttcaatgtcaatgcctaccggaaccgaagaagcaagcatcaccgccacataacctttcgtatgagaaatactgataaaaaaagaatgatctgtgagataaggtttcccctcgggagagtaaccgatttccttatcctcctgcaacatggaatacaacagaacacgaaccgacaaccattccatcttacgacgttcggagacaaagcgattcaattcctgctcacagaaagctcttcgcgcaccgggcaaaagaagcaataaagcatccaaagactcttccatcttccagacagcccactgtatgccattcgtcttatactgcagaaacgacgccatcttccatttctttcggcagaattgtaaacttaactttcaatatacggcgactatccatttcgagcacttcaaactcataattgtgatacgtcactttctcatgcagcgccgggaattcacctttaatttcgagcaacatacctgccaatgtatctgcatctcccaccaccttttcaaattcgtcttcgtctacttttgcaatcttatagaaatccgtcaactgcgttttcgcttcaaatatccaggtatggtcattcaaaacaacgtatgtacgctcttcatcatcgtattcgtcgtgaatctcacctacaatctcttcgataatatcctccatcgttaccagtccggaagttcctccaaactcatccacaacaatagcaatatgaatcttattcgcctggaagtcacgcagcaaatcatcaatcatcttcgtctccggcacaaaataagccggacgaatcaatgactgccaacggaaattatcccccttattgacatgaggcagaaggtctttaatatacagcacccctttaatattgtcccgtgaaccagaatagataggaatacgtgaataagcattttcaatgatacattgcatcacctccttgaaagatgtacggatatccagatcgaccatatccagacgtgatgtcatcacctccttcacggtttccccaccgaaacggataattccctccagaatattattctcttcagaaagctccgctttatccgtcaattccaacgcgtgcgacagttcatccacagaaatattgtgactcttcttcacaaaatgcttattcagaaaagttgtcgaacgcacaagcacagtagctatcggacggaataccttttccagaaagtaaattcccggtgccgaaaaacggcaaaaggccaatgttttctgtgccgaataaatcttaggcataatttcaccgaacaacaacaggaggaaggtcaggatgacggtcagtatcaggaactctgccaacggagaatggaaaacaaacacattcataaagaagaaattgcagagcatgataatggtcacattcacaaaattgttcgtaatcaatatcgttgccaagagacgttcggtgtccccaagaagagcacttattttatcgtcggaaggatgattgcgctcatcaatatcattccgatcagaaggagatagcgagaaaaaagctatttcggaagccgaagcaaagccggaagcaagcaggagcacacctgccagcgctatggcaataatagcagagatagaaggagtgtttacggtaataccgttgaaaatgtcagccaattggcttaaataaccatctgagtccaaagagtttatattttagttaaacaaaagataatgtgccaatgagttagaaaaaatcgattggcacactatcacattatttagaacggcaaatcatctgccggattatcttgtacaggttgcgcctgcgactgctgcgtttgttgcggctggccggcaaccggttgttgctgctgtcccatagcaggctgtccggaagcagaagctcccgcacccgggttggctcctttcggagacaacatttccatattatccacataaatttcagtgatatagcgcatagcacccgactgatcgctgtaagaacgcgttcttatcttcccttccagatacagcttgtcacctttgtgcacatatttatctacaatctctgccaaacggttagatgcaacgatattatgccactctgttctttcgggaatctgggttccattagccaacgtatatccacgatccgtcgtagccaatgggaaagttgctactgccgaacctgtatcgaagtatttcacccgaggatcttgtcctacatttcctaccaatatcactctatttactgacatatctgtatcaagtttatgattcttaaaattaaatctgctgccaaaattaaacagaataacaataggatgcaagaattttaagtattaaaacttaatacttgccatttagtgcttgcagcagagtttgcaccagccttgaaatagcgtactgctccagttcctccacttttattttctggaaatcaccgaaagaagtcaaattttcagataatgttacttcatacagattagcataaatcacccggtgagacaacacatgcttcacttccctgcaaacagaacgcaccaccggcacttcccccgatgcaaagaatgtacggaattccggcaaagcaagaaactcttcctccgaaagagccgtcggagtctctatcaatggcaattcgaacagattcttccaaatatcatttcctgttcgtttatttataaaggtatacgcgcccgcacgtacataaatataattgaagtaacggttggtagtctttgttttatgctgtttcaccggaagctttgtcactaaccccttcgaaagtgccgagcaaccgcctgccaagggacaaaacaaacagttgggcgactgcggagtacactgaatcgctccgaaatccattatcccctgattgtaaacagccggatgcttcttatccaacatctcatctgccaatgctgcaaaaagtttctttccttccgtcgaatcaatcggagtatctataccgaaataacgtgaaagcacccgatacacattaccatccaccaccgcataaggcataccgtaagcaaacgaacagatagctgccgccgtgtacccccccactcctttcagagccagcacttccggatatgttttcgggaaaacaccattcatgcttttggcggcagcatgaagattgcgggcacgcgaataataccccaacccctgccaatacttcatcacctcgtcctcatccgcagcagccaaagtctgtacatcgggaaaacgcttgataaagcgaagaaaataatcatacccctgcgccacccgcgtctgttgaagaataatctccgaaatccagatcagatacggatcggcagactccctccagggcagttcacgtttattctcttcataccactctacaatcgttttcgtaaactcgttcatatcctcattcctaatgtattatctaacatttatcttgtatatcctactcaaaaggcacacaaaagtaactcttttagctctaagaaaaccctatgccactatttttttagaaaaatgtgcagaatatatttttttaggagcttaaaaagctatatatttgcagtccaaaaaattagcaataacatagtaataatattttttttaaggaaaaatgactaaagcagatattgtaaacgagattacaaagaaaactgggattgataagcagacagttcttacaacagttgaggcatttatggatgcagtaaaggattcactgtctaacgatgagaacgtatacctgcgtgggtttggtagtttcgtagtaaagaaaagagcacagaaaactgctcgtaacatttctaaaaacactacgatcattattccggagcacaacattccggctttcaaaccggctaagacatttacaatttcagtaaagaaataataaacaagagtattaacccataaaatgtgaagctatgccaagcggaaaaaagaaaaaaagacataaaatgtctacgcacaagcgtaaaaaaagactaagaaagaacagacataaaagcaaaaaataatttttaagtctggatcacacagaaataaagaacaaacttgcgaagctaatgtctttcaagtttgttctttgtttaagtagctaacccaaaatgaacaatttgtcaaaaaagttgttcatataaacgagattcaatcaataataaggaaacaaaacagtgacaaatgaactagtagttgacgtacagcccaaagaggtctccatcgcccttctcgaagataagagcctggtggaacttcaaagcgaaggaagaaatatttctttctctgtgggcaatatgtatttgggacgtatcaagaaattgatgcccggactaaatgcatgctttgtagacgtcggttacgagaaagacgctttccttcattatttagacttgggtcctcaatttaactcactcgaaaagtttgtaaagcagactttaagcgacaaaaagaagctgacctccatcagcaaagcaaccctgcttcccgaccttgacaaggatggaaccgtatccaacaccctcaaagtaggacaagaagtagtggtgcaaatcgttaaggaaccgatctccactaagggaccgcgactgacgtccgaaatttcgtttgccggacgctatctcgtactgatccctttcaatgataaggtttctgtttcacaaaaaattaaatcgagcgaagagcgcgcccgccttaaacaactgctaatgagcatcaagcctaaaaactttggtgtcattgtccgcacggtagccgaaggcaaacgcgtagccgaactcgacggagagcttaaagttttggttaagcattgggaagatgcgatggtaaaagtacaaaaagccaccaagtacccgacgttgatttatgaagaaaccagccgcgccgtaggtttgttgcgcgacctcttcaacccatcatttgagaatattcacgtcaacgacgaggctgtgtacaatgaaattagggattacgtatcactgattgcgcccgaccgggctaatatcgtgaaactgtacaaaggccaacttcccatttacgacaatttcggtatcaccaagcagattaaatcatcgtttggtaaaacagtctcttacaagagtggtgcctatctgattattgagcacactgaggcgcttcacgtagtagacgtgaacagcggtaatcgcaccaagaatgccaacgggcaggaaggtaacgcactcgaagtaaatctgggagccgccgacgagctggcccgccaactgcgattaagagacatgggtggtatcattgtcgtcgacttcatcgatatgaatgaagccgaaaaccgtcaaaagctttatgaacgaatgtgtgccaatatgcagaaagacagggcacggcataatattctgccgcttagcaaatttgggctaatgcagattacacgccaacgtgtgcgtccggcaatggacgtcaacacgaccgaaatctgtcctacttgcttcggcaaaggcaccatcaaatcgtccattctctttacggacactttggagagtaaaattgattacctggtcaataaactgaaggttaagaaattctcgttacacgtccatccgtatgttgccgcctacatcaatcagggactcgtttccctgaaacggaagtggcaaatgaaatatggattcggtattaagattattccaagtcagaaactcgcattcctgcaatatgtgttctatgatacacatggagaggaaatcgatatgaaggaagaaatcgaaatcaaatagacaaaaggcggctcgttaggtacgggtcgcctttttgtttgatctatttctcttccactatccacttttcaatattgcgggtttccgcactgaaatttactcctattttaaaaagcttccgtccatccatctcgaaaggaagagcataatgcttgtcgtttatctgttgtaaagcctcttctgccgtaccgttcagtttaaattccatgatatagatgaaattgtctgtctgcaagacaagatcgatgcgcccttcgcttgtatgatattccactttggcatagaagccaaccagtttaaagacgatgaaaagtacattctcgtaatgcagttcctggtcgcgaatcacttcgtaggtggtatctgcaaagaaactttgcaggcgacggaagaaagagtcgtaatcgccggattccacttcacgaacaaacttctgaatttcaaaaggagattctaccttattcacattcgcataataaggaagcagaaaacggacaaacccctcttctacttcacgattcgggaaacctaagcggtatattccaaaacgttcgtcataccctttaatggtgaggtagccactctgataaatcaccggaataggattagtcgattcggagtctatactattcaatacttgggcatcggtttcttcgtgtgtcatccgctccaagtcataatgatgtttttgcagtaatttcaccagataagtgggtgtacctgtttcaaaccagtagctgccaaattctctatacttaaaagcattgagcaaactaaacggattatacataccgattgaatggtgcgtaaagtgatagccgtcataacattccttcaattctgcgcagagtttatcatacgtcacaccgcgtacgtccgcaaattcatgaagttcggcatccaaagtatcatgaagttcctgatcgctgacaccacagatttcaacataatctctccgcattgaaatatcatccagattgttcaagtcactaaatacactgactttaccaaactttgtcaccccggtcagaaatgcaaacttgatgcaaccgtccattgttttaagcgccccataaaaaggctttaatgtattccgaaattgcttttgtaattcctcattaccgatggcttgcaacatgggtttatcatattcatcgacaagaataaccacacgttgccccgccaacttacaggcgcgctctataataccggcaaaacgcaaagaaaacgaacgttcggacggctcggcaccatatagtttctcccatgctgtcagcgatttatcaagtatattatccagactttcggatgtgtcatatttctcaatattaaggtccagatgcaatataggatattttatccagtccttttccaacttttctacagccagcccttcaaacagttctttctttccttgaaagtaagcctccaaagtagagacgagcagactctttccgaaacggcgcggacgactcaagaagtaataacgcccggtttttaccatttgatacatcaatgcagttttatcaatataaaaatagccatcctgacgaaggctttcgaaattctgaataccgatcggataaattttatggctcatattctcttcttttataaatcaatgcctttcttgcaaagatatatatttttaatagaactctttgtcatggcaagttaaaagattcttttcaacaattcattctacacatttaccaggaaataatttaaggacgacaaagtaagaggaggaggatgcgcaaaaaatgaaaagcccggacttccgcaagctcgggctttctatattttcttcaaagcatctccttatctataataagaaaatgggaaacggacaagtgctttttatgttacttatttttcttcaactatccacttttcaatattgcgggtttccgcactgaagttcactcctattttaaagagtttccgttcatccatctcgaaaggaagagcataatgcttgtcatttatctgctgcaaggcttcttcggccgtaccattcagtttaaattccatgatataaatgaatttgtctgtctgcaagacaagatcgatgcgcccttcgcttgtatgatattccactttggcatagaagccgaccagtttaaagacaatgaaaagcacattctcgtaatgcaattcctgatcgcgaatcacttcgtaggtggtatcagcaaagaaactttgtaaacgacggaagaaagagctgtaatcgccggaacgtacttcacgaacaaatttctgaatttcaaacggagattctaccttatttacattcgcataataaggaagcaggaaacggacaaatccttcttctacttcacgattcgggaaacctaaccgatacattccaaattcttcatcataccctttaatagtgagataaccactctgataaatcaccggaatgggattagtagattcagagtctatgctattcaatacttgggcgtcggtttcttcatgcgtcatccgctccaagtcataatgatgtttttgcagcaatttcaccagataggtcggtgtgcccgtttcaaaccaatagctgccaaattctctatacttaaaagcattgagcaaactaaacggattgtacatgccgattgaattgtgtgtaaagtgatagccgtcataacattctttcaattctgcacagagtttatcatacgtcacacctcgaacatcagcaaattcatgaagctcggcatccaaagtatcatgaagttcctgatcgctaaccccacagatttcaacataatcttttcgcatggatatatcgtccaagttgttcaagtcactaaacacactgactttgccaaactttgtcacaccggtaaggaatgcaaacttgatgcaaccgtccattgttttaagcgctccataaaaaggctttaatgtattccgaaattgcttttgcaattcttcattaccgatggcttgcaacatgggtttgtcatattcatcgacaagaataaccacacgttgccccgccaacttacaggcgcgctctatgataccggcaaaacgcaaagaaaacgaacgttcggacggctcggcaccatatagtttttcccatgctgtcagcgatttatcaagtatattatccagactttcggatgtgtcatatttctcgatattaaggtccagatgcagtataggatattttatccagtccttttccagtttttccacagccaacccttcaaacagttctttctttccttgaaaataggcctctaaggtggagacgagcagactctttccgaaacggcgcggacgactcaagaagtaataacttccagtctttaccatttgatacatcagtgctgtcttatcaatatagaaataaccgtcattacgaattttttcgaaattctgaatgccgatcggataaattttatggctcatattctcttcttttattaatcaatgcctttcttgcaaagatatatatttttaatagaactctttgtcatagcaggttaaaagattcttttcaatcattcattctgcacatttccccggaaacttagggacgataaaataaggggatgatgactgcacaaaattacgaaaagcccggactttcgcaagctcgggctttctgtatcttggggacgtctcctttacctatagggaaatgggcgactagcaatttgattctagtacaacaaaaaagacgttccaagagtaaagataaaagggatgccagtgggaaatgtggggaggcatcccttttctaatagaagaacaaagatggaaggatggactttcacaagctgtgtctcttcgctttgtcacttctcaacatataatcttcacacttcggtgaagaagggtttcatatttatggagagagcgcacttcaacaagcacgggctctcctattatgttatatcattctagaaatagctcgcacctctgccagaggcaaatatagaggaactatctaatagaacattgaatgatttcaaattaatctgcaaagagagcagtagggaatgttactgtcttcactacagctgcaggagatgtcgcgctccagctgattgaaggagtaatagtaaccgtcactaccaaatcttgcacaagacccttcaaggccttaccatctgctgttaatttcagtttcttattagcatcaaacttgaagtaaactttatcacttagttctaccttaatagaatatccataaagagcaagaacatcgtcagcagtagtcaaaacactagtgtcataagtttcaccatttgcagtcggccacatattcttaccttttctgtctttccatacaatgtcacccagtacatcaatctctgcatctatggtttcagctgtatacgctgttgtgataccttttttagcgtccgttgcaccaaatgttgatgtaagcagttttgataatgagataaatttcaccttttggttagcaattgaagcaggttcagcagcatcgttaggttgacaatttacatttacggtcaatgccatattgtctttagcgtgatccatgtctactgtgaatttaccgtcagattcacttcctacaggatcttcaccattcttgtctatagcatacgtaatgctgttgtatatacctgaagtaactccaccagtaatagcgctccatgtagtaaagattgagcccatttctctttcgaggctgatgctctgaatcttatcaccattcttagtttcattaatcagaagagatacctcgtcatcttcagtccacatacctgaagtttttgtaaatacaggcatcttatagtcaacagttaccggcattttgaatataatttgcttcgttgcgtcgacgtcaactgtcaatacgacttccatagtacccttgtatgcagcggctactgtcagtttcaggtcatcatatttagtatcaccagaaacaccaataccactgaacttcactttgtctccatcgttaaccgtagcagttgagctagcaagtttagcagcagtaatagcgtctttgattgccttaatattagctgctgacacaacaatgtcggatttttctgatttattccaaactaccgtctgtgctgccaaagattttgtttctatttgcttgaaggtgacagtcagtttagccggagcagaggagccaccgacgctagaataatcaatgccctcatgagcttctccatcaaaaggaatgccatttgtagttatatagcagacttcaacctttgcttcttgccctttggtagaagtgatggtttgtttgccggcttcgttcgttcccaatgttacaccttcaggagcatcggctgccaacttataataatatgcatagactgtactcaaatccataggagtggtggtagctgcagctgccaagtcatccaaaacctgtacctcaccaacttttgcggacactgctgcatctgccagtttagtagcacttgtaactgcttccggtttgattttaacatcataagcagagattatttcattgttccatgcgtcttttgtacagaatgcgtatgcttcatctgcaggaagggcattctccaaattcaagccatcttttagtgtaacagtaaggtcgtaaacaccacgattcactttagcttcggtagcacgtgtcaatggttttgcagttttattttgttcgatcttagagataacaaaattagcttcattttgagaattcatcaaatagatttgatatttgctatcagtaaagtcaggacctaccggattaatcaacgcattcaacacgccggaattagttattaacaggtcatttttcttaaattcttttttctcatcacccataccaaaagtgaaatcagctttgcattgagcataacttaatttaagttcctttgttccgcctgcagtgattttaccattctcaatagtcactccttcaatgctactaatcaaagctgcagtaggcaaaatacttgttaattcagttccagtagttttatcttttacatgtagagtgaagctaggtaatccctcattctgtacagcataaacagtggctgacgaataatcaccttttacccatttatttgtaacgtcatcataaaaataccaataatctttttcaaattcacctgttccatcgccaataaaaggagattttccggcaggaccggcaggaccagcaggaccagcaggaccggcaggaccaacaggaccttcggggccaacaggaccagtagcaccggtctcacccttttcacctcgtgccggtttcccagtatcagcaccgtctataaaccagtttccattttctccaatttcaacgacagatccatctttaccattcacaatagaatatttatttccattgttgaaagtaatttcaaatccaccagtgatacttttaatgtctgttacccaattacctgcattcacttttgcttgcagttcagcaagacctgccgcattggcatcaatctgcgtttgcagattgtcgatgtcatcatcatagtctttacagcctacataagtgacagtagcaagcgtcaatgccccgaaaagcattaccctaacaaaatttttcttcataactacttaaaaattacattaataatatattattaaacactaagtttcaataatagaccgcccgttactctgtaggtaacggataaacctttgtgcctgctcttttggagtagtcaatactgaaaaatgatatgataagcaatgaaacatttttacccctgcttctgaaaggcagtagagggaaggagatcttttgcaaaaaattagaagttaacaaagccctaatacaaagaatccgcgtgttttatttggttaattcctattttgagtagtttattagaaaaaatgtatgatttcgtttggttgttttaagaaatatgctcatatttgcaccgatattcattcccgttacctacagagtaacaggataattttcaagcgtttacacctatcacagagcgttttacaaagtcaagaacttgtctatttgcttcatcaattttcttactccggaaaggtttcaggtaagcctcggtcacagtgatagacgaatgtcccatcgcttcggagataatgcccggatggatttcacaataataagccgtcgtagcccaggtatggcgggcggtgtacgaactcaatttatcggataatcccaataattcacctaacaacatcaactgttggttaaagctgcgcaatgccaactgatattcgcgatacgcctctttagttccttcacggcttttcaacaacggaaataaataaggagaagaaggatcacgattcatatacttcttcaccagaatcatcgcttccgcagtcaacgtcacagatagaggacgacctgtcttacgtctgcgatacgttattacgttatcacgcaaatcactcttacgcaaataagcgagatcgacaaacggcataccacgaagcgaaaacatcagaatgaacaactcttgcgcctgacatacagcgaatggcacaccggacgtacgagataatttggcaaacactttcttcatatcgtcatcacacaacgcacgtttatgatcggcacgagtaccggtataaacagaacggaacaggtgaggaacataaggtgccttacgaagatcgacggcacgattgtaaaccgcacgaaacgtacgcagataagtggaaacggtgttccagctacaaccacgactacgaaggtaaacttcgaaccccttcagccactccgaagttacttcactaaagagcaaatcttcttccccacaataagcaatgatggcattcagactgctacgataaacgtgtgcagtaccgaagtttccctccacctgtagccccgtggctacttgcttcataaatgttactactttcaacatttctcaatttattaatttattcgacaataaagatacaagtattctttcatctaaaaactcatcatacgaacaaaactgaaaacgaagatgttttataaacagaccttatctatggaagtcctattaaatacatgacgaaaagcccggactttcgcaagctcgagctttctatatcttggggacgtctcctttacctatagggaaatgggcgactagcaattgattctagtacaacaaaaaaaagacgctccaagaataaagataaaagggatgccagtgggaaattagggtggcatcccttttctaaatagaagaacaaagatagaaggatggactttcacaagctgtgtccttcgctttgttctggggtaaaaatatctttttcacacataggtgaagaagggttttatctttatggagataatatctcctgctcccgacaggaagaccccatacgtcacaggagatatatcatcatctaattaattagtagtatcgtctacccaagttgaaactttgactgtaatagtcttagcctgaccaaccatgctaccccaaggagaagtaggagtagctttcacagtaactaccaagttagcattgttcatactcaatttagccattgcatcagtcaatttgagtttattatcagaaatagtaggcttcacaaaagaagacgcatcatttcctgaaagagaatactcgatagagaaaccgtagatagtcatagcagcacttgcataggtgtcagtagcaaaagtaggccatacttctttgctatttttatctttccagataaatgctgttgtcaaatcaaaaccggcttttcttgtactctcatctgtcacatcatagtcaaattcagtcttttctgcatctttatagctaaatgttccgttcaagttagcggcaggaatgattaccggaatagtttcggtgaatattacgttctcaccacattttccctgcagcgtaacattgattggttcgccatcgtattggttagtcactgttacagtaccgtcattttcattaacagttacaccacgactcgccggagcagctttttgagtattagcagcaagagcaaacttcatagtaccgcccatatccgtaactaatttgccatacacggcatcataattagaataaagttctttcaagcttctggatgctgttactgctgttatcttgctgctaggatctttagcaaagttagttagcaaagttccgtccgtttgagtaatagcttccagtttaaatgccgcatcagtttctttaggaagagttacggttacgcccttcactgttacatcaacagtgtaatcaccattcgtaatcttcgtagtaatatcagtagcctcacaagttgtatttgcaggaacgaccaaggctagttgattgctgccgttcaaacctaacttaatagtctgatcttgtggaacaccttcaaaggtgcaaccggagaaatcactcatactagcatctcccaatgcagtttttattgcagttataacagcagcagcgtcattggtagtagcgatgtcatacttcttttctgcagcattccacaaaataggatctgttgaagccagtgtagccgtttgtgcctgtccttcgctgacaattttaacttccgtatattccttggcatcataaacttttgtcgtaggatgttcctctccggctgttgcaggatctgtcactgttacaatagattgtacagtagcttgacttcctgcatctcctttagctttcaatacaccagtctctgcattcaaatcaaagttagcagcaacatttgctgtcgttgaaaatgctacactgaaatacttatcagagataccgagttcgctcaatgtctttgtatcaggagtaccgtctacatctccattagcttttattgctgtattcacagttacgttataatcagataccttggcatctccatcattttccttatagtcaatactagcacctttcttcactgttgctactcctgcatttgcagatgcccattccaccttactgatatacagattactcttcacagcggcaaaatagttggaggagacatcattcaaagtcttcttatcggcagcaactttgtctgttacagtcagagccacagcataactatttttcactgcgctagcatccaatgttacttcaatcaagttaggttcagcatctaccactttgattccttttatcttgaacggatcgtttagagaacgcgtcttcactttctggcaatctacagaaataacatatttcgcattctcacttacttcaccattctcaccataacaagcaaccaaatcttttattacatcagccggagatacacggaatctcactgccacttcgttgacattgactaccgatttccagtcgtgaccaccacccgtagcaaagtccacatagtatgtattgaactgaacctgtccgtctgcataagtcggcacatacacgatactctgaatcatgcctttgatagcgtcgatttctttctgaagatgatcggtcaaatctttgatcgcttgattgacagctgatttctcatcagcaatcagcgcttttacaccttcatccaatgtggcagtcccttccggcatattgagagcagcaacagctttctgtgcgtcaacaatctgtttgataagagctgcatagtttgcataatctgcgccttctgtttttgctacataagcattgatggcagtcagcaattcatttaattgtgcctgctgtgctttagcatcatcactgaaaagtttatcgtacacatttcctacaaaagtagccagcgttgtagacactccatatttttcagtaagtacagcattgatgttaccgagttctgttgtgattccgctttgaacagctcctgttacatacttagcaatctctccccacttatcctgatcggttccatcatgcttaagagcatcgatgatagcttgatttacataagcaccgaagctggtactttcgtaagcacttacattttttttgccggatgtgatgtatgcctgttctgctgcaatcagttcagataatacggttttggcatcttcaagttctgtaatcttcttttccaagccactgactccatcctcacctttgagaatcttttgcaaagaggtcagttgattttgaaggtctgccaatcttgctgccaaatctttagctttatcacctgtagcatctgccaaagcttgttccaatgcagcgattttttctttcaaagttttctcaccatccggattttccacaagtgcgctcaagtcattcagttgtgtctgcaaatcctgttttgccttttcaactgcgctcttcatgtcttctgtacttaccggactggtcgatgtgatcttatcaacctgctcctgcaagcctttaatatcatcatcatagtccttacagcttgtcaccactgtactgactgtaagcgtcaatgctccgaaaagcattaccctaacaaattttttcttcataactacttaaaaattacattaataatatattattaaacactaagtttcaataatagccgcccgttacttcgtaggtaacggataaacctttgtgcctgctcttcgggagtagtcaatacggaaaaatgagacaatatgcgattacattctttacccctgcttcttagaagcggcagaggggcgggagaccttttgcaaaatttagaagttaacaaagccctaatacaaagaatccgcttgttttatttgtttaattccttttttgagtagtttattagaaaaaatgtatgatttcgtttggttgttttaagaaatatgctcatatttgcaccgatatttcgacccgttacctacgaagtaacagaataaaaatcaagcacttacacctattacagatcgtttcacaaagtcaagtacctgtttatttgcttcatcaattttcttatttcggaaaggcttcaaataagtttctgtcacggtgatggacgaatgtcccattgcttcggagataatacccggatggatttcgcaataatacgcagttgtagcccaggtatggcgggcggtgtacgagctcaaccggtctttgagtcccaatgcctttcctaataattccaactgataattaaaattgcgcaatgccagttgatattccctatacgcctttggcgaaccttcgtcactgtgaagaatcgggaacaaataaggcgactgttcctcccgattcatatacttttgcaaaagaaacatcgcttccgtcgtcaacgtcacagacaacggacgccccgttttacgacgacgataactaatcacatttccccgcagatcactcttacgcaaataagccaagtcgacaaaaggcaatccccgaagcaggaacataagaatgaacaactcctgcgcacccttcatggcaggagtgatagcgtccgactgcaacagacgggcaaacaccttcttcatatcctccatatccagtgcccggcggcggtctgcccgcgtacctgtatatacggatcgaaaaagatgcggcacgtatgatgccttccgaagatcgacagcgcgattgtaaaccgcacgcaacgtgcgaagatacgtagacaccgtattccaactacacccacgtgcacgaagactaccctcaaaatgcttcagccactccggagtgatttcccaaaacgacaaacgatcggaaccctgaaaagtaagaatcgcattcaacgtacttctgtatacatgagcagtccctaaatttccactctgctgcaaatcaacagccacttgtttcataaacgaagtaaaactttcctttttcattaaaaataaattaataattaatatttacttttcccacactttactttagtaaaatacaaaaatctatcttcaaaaatttacatacataaaatctaaaaaataaaaactaaaacatttacattaatcatcaaagtaaatttcatacatttgcgcaatttttcaaacaacatattattttaaccatttaagtataaaaaatttatgaacaacaatgaactagctgccgaacgctacagcattaatggattcaagtatttctccgaattggcgaaagagtattttcccgatctggcaaacgcttcttccgccagcaaaaaaatgcgcaaacgcattaaagcaaacaagacattgaacgaacaactggttgctgcgtattacaccagccaaacaatcgatgtcagtcctgaaatgcagctaatcatctaccgacactggggacctccccacattgacttgccgacaaacgtttagcgcgtaacagaaaacgaaaacacggacaagaaataaaaggaaaatcgaactatatatttttaaatatatcatttatcttttattgtttattatgtattccactttgcgttcaccactttttttcaaaacgaagataactaccaatcatacagctatttacagaaagaaaaaagcgttccacaaagcgttcggcaaaaatgaccgttttttcactacaaacaagaccttcgaatccccccaaacgaaggctttgttttttctccaacagaagctccaccaaccaccaacaaaagctccgccaaccaccaacagaagctccgccaaccaccaacagagcatccgttccatccccactccttccccggcttcatgaaagaagaaaaaaacagcgatttgcgcatcgcggcaccctttattcatccacacccgtccgcacggaaccacaccccttgcgcatcgcacaggaacggcgtacctttacagaaatttaaaacgataacccaatgaacaatttcaattttcaaaccatgatggaacatggttttctcattatccccaaggccctgctacaacaacaaatagaagacccgaacatagaagccggagaaatagaagcgctcctgaaaatcctgatgaaagtcaactattcggacacgttatacagcgaccggcagcacaaagactacctgtgcaaaagaggcgaaagcatgttcagctaccgcgactggagccgcattttccgctggtctgtcggaaaaaccttccggttcatacacgcccttgccatcctggggatcatcgaaatcgtcccccatcccaacaacccgtccctgcatattcgtgtcgtcgaatacgacaaatgggtaggagcccccgacagcggcaagcagaaaaaaaaagccgtcaacgagaagttccgcctgttttggaatgagtttcacagcatcacgcagcttcccaaagaaaacatcgccaaagcgcaacgcgaatggaaaaaattaagcgacaaggaacagcaactcgccatcgacaaggtagaagattattatttccaccaaacaaacatcaactacctgctccacgccgccagctatttatccaacaaagctttcctaaacgaatacagataaaacgaatcccaattaaacgaagactgattaaacgaacactgattatgaataccgaaaacagagtttcaccacaggctcccgaaatagaagaagccatcatcggcgcctgcctgatagagcagagggctataccactgatagccgacaagctacgccccgaaatgttctacgtcctgcgccaccaactgatctacgccgccatactggctatgtaccacgccggaatgaaaatagacatcctcaccgtaaaagaagagctttcccaccgcggaaagctcgaagaggcgggcggagcgttcggcatcacccagttgagcagcaaagtggcgacttccgcccacctcgaatatcacgcgcagatcgtacacgagaaatatctacgacgcgaaatgatcttgggattcaacaaactactcgcctgcgcgctagacgaaacgatggacatcgacgactcgttgatggacgcgcacaacctgctcgaccgcctggaaggcgaattcggccacaacaaccacatgcgggacatggatgaactgatgaccgccaccatgaccgaagccgaaggacgtattgccaacaacataaacggagtgaccggcatccctaccggactggcagacctggaccgcatgacgtccggactccaaaacggcgaactagtggtaattgccgcccgtcccggcgtaggaaaaacggcattcgcactacacctggcacgaaacgcagccatggcaggacatgccgtagccgtctacagcctcgaaatgcaaggagaaagactggccgaccgatggctgacagcagccagcgaagtcagtgcccgccattggcggtcgggaaccgtcagcccgcaagagcttgcagaggcacgcacagcagccgccgacctcaaacgcctgccgatacacgtagacgacagcacctcggtcaacatggaacacgtacgatccagcgcgcgactgctgcaaagccaacatgcgtgcgacgcgatcattatagactacctgcaactctgcgacatgacaaccggccaaaacaaccgcaaccgcgaacaggaagtggcgcaagccacccgcaaagcgaagttgctagccaaagagctaaacgtaccggtggtactgcttagccagctaaaccgcgaatcggaaaaccgccccgcaggccgccccgaactggcacatctccgcgaaagtggcgcaatcgagcaggatgcggacgtcgtgatattactctaccgccccgccctcgcacgaataacaaccgaccgcgaaagcggttaccctaccgaagaactaggcatagcaatcatagccaaacaacgcaacggagagacgggaaacgtatacttcaggcataattcggcaatgacaaaaatcaccgaatacgtcccaccgctggaatacatgctgaaacatgctaaatagatacagattcatcccgattccatacaattttatattacaatatatagctgtatggaatttcttttttatttcattattgatataaaataaatagcaaaatacttgactttccctttcaaatttcgtatatttgtaatgtcaacaaggacagaaaatattattacttaaaccttaacttttttaattgtatgaatgtattagtggagcgctatcagcgcagaaagtatgtgaatcagccggattcacagatgttgtattatgtacgccagaaatcgggcacagtgagagtgatggacatcaacaagctggccgatgccatcgaagcgaactcatcgcttacagcaggagatgtgaagcattccatcgaggcttttgttgagcagttgcgcctgtcgcttacccagggcgacaaggtgaagattgacggattgggcacgttccatatcacgttgagcagcgaaggggcggaaaaggagaaggattgcacggtgcgcaatatccgcagagtaaatgttcgttttgtggcagacaaggcacttcagttggtgaatacgagtcatgccactacccgaggcgagaataatgtcgatttcatcctggccggaaagggtgacggagaagacgcggatggcggcaacggtggtggaaacagcggtagcggcggaagcggagaagctccggacccggcagcctaatcattaaaaacagtgccgcatgggtattacagagtgatttctacaattgctctccatgtggtttctgttttcttctacgtttattttttaattctcaattttcaattctcaatttattaaaatgctcgataaaatcatagagatcattatgacgatcctgccctttctgggtagtaatcgcaagaagcgcaaagcaatggcgcaagaagtaaaagagttcagtgaactggtgaaagaccaatatacatttctgatgcagcagttggaaaaagtgttgaaggattatttcgaccttagctcgagagtgaaagagatgcatacagagatcttctcgctaagaggtcaactggcacaggctgctgccttgcaatgtatcaataaagagtgtccacaacgtagtgtggcagaggcatgatagtgattcagtctatttaatccatccatgagaactataaatctgatagtaatccattgctccgctacgcgcgaagataagagtttcacagaatatgacctggacgtctgtcatcgcagacggggattcaacggagcggggtatcatttctatatccgcaagaacggggacataaaatctacccgtccgatagaacggatcggtgcgcacagccgcggtttcaacaaggaaagtatagggatttgctatgagggtggactcgactgcaaaggacaaccgaaagatacccgtaccgaatggcagaaacattcgctccgggtattgattctcgctttattgaaagattacccgaattgccggatatgtggacaccgggatctaagtcccgacctgaacggaaacggcgagatagaaccggaagaatggatcaaggcctgtccctgttttaatgctgaaacggactggggaaaagtctgaaagaagatacattcaactcaaataaagatgccgcctcccgtttctccaaattcaaatacaggtaattgtcaaactgttttccaaattcattaactaccgttgtcttaccgacttgccttgctccacgcaatatcaaaggcttcctgtgcgtatcgactttccatctttccaaatgaaataatatatctcttttaaacataagcaataaacttattgattttcagcaataaatttataaaaagtttccaaagatggggcaaaacatcattgattttgttccaaagatggggcaagatgccagtgattttgttttaaagatggggcaagccacactaatactgttacaaaaatgggtcaaaacagaatttatatagttacaatcagctgatttacaaattagacgatttactatgtaccgactccaatcgtacatcgtaaatcgtctaatcgtctaataagttcgtctattatttcacgtcgaatgcagcttcaatcagtgctttcaagttcagataatgacttctgtatattccgctggaagcatttgccgcattagtcaggtctcttttaagatcagtcaactgtccgcgtgcaatggtcggtgcctcggaagggaaatcgaaagccacaagcgaataaccacccagacttccgagcgagccggaactgttcttcggtttatcaagcattccgatcaacgcattgacataagtcttctgcaagctacgctgggaagcatccggtttctttcctccttgcagatcgctccagatactcttcttcaaatcacggaacaaatcgttggccgtgtatgctttcgctccgttgaccagttcgttatccgtcattttgtcgagcgtgcggctactaagcagttgtttcaatgtactgctctgtacacggtagatcgaattgaaagtattgatacctgttctttcggtcagtttatcatccatcagccaagtcggtgtggtgaacagttctttgttcaagaagtcgaccgctttcttctgaatatctttcggtacgtattctaccgctttcatgtctgtctgttccacagaaatcggattgtggtagataccggcaacattggtagtcacatgccccacgtacaagctgaattgtcccaccacattctgatacaagcggacggccttcatataaccttcattcggttcataagtccagttcatgatttcaggcatcacgcgtttcaggtttttgatgccatacgaacttgccaacatggcatcgtctcccaaatcctcactctggttgcggggatcgtttctgtcgagttccgttccgaacgtgtaacgtttatcttcgcgcaacttcccgatgatccacttattcaggtgaggtatttcggcttccgccgtttcatattcgggcatccagcggtagccccactcaatcgcccatttgtcgtagataccgatacgggggaatattcccgaacgtgagatgttgtcttccggctgcgccacatagttgaaacgggcatagtccatgatagacggcgtgtgcccgttagcttccacccatattttgtctcttagtttctctaccgggacggtattggaagagccgaagttatgacgcagtcctaacgtgtgtcccacctcgtgggaggagacaaagcgtatcagttcgcccatcagttcatcgtcgaacatcggtttgcgtgctcccggatcaatggctcccgcctgcacgatgtaccagttgtagagcaggctcatcacgttgtgataccagttgatatgcgtttcaaggatttcaccgctgcgagggtcgtgcacgtgaggtccgcttgcgttgggtatatcggaaggtttgtacacgatagccgaatggcgggcgtcttccaggctccaagaaggatcgtccgtcggcgcttctttgccgaagatcgcgtttttgaatcccgctttttcgaaagctgcttgccagtcgttcacaccttgaatgaggtaaggcacccatttcttgggagtggcggggtcgatgtagatgataatcggtttcttcggttccaccaattcgccacgcaggtatttctcgcggtcttcgtctttgggttcgagacgccagcgggtgatattcgctttatacttcactccttgcggattctcgtcaaaatccttatagctcacagcaaagtaacctacccggtcgtcgtgcaatctcggtttcatcggttccttgggaagtaatagcatagagctgttcagttcgtaagtcaacggagtggtagaggtggcaaagaaagctgccagcagtttctcaagtccactgcctcctcctttcttccgctggaaggtacgcacggtacgtatttcgatgttttgcggaaaggctttcagtgtgtcgatataactggcgtcgtctaccatgctgctcgctccgatgttgtctttcacccggctggtgaatgaaaacatttcgttgtccttacggatatagtcggtcatgtcgatcacgtagttggtagtttctccttctttgcggacagttttcagcgggaaggtggccacaatgggttgaacattggagttcaatacggcctgatacatgcccagtgtatcagcagaatgttcgagataagagatttcacgcacgaacagtttgtcgccgcgtcctttctcgaaacggatcacttcgtcgctgatgtaatctcccggatagccgactttccgcttctgcgcgtctaccggtgctttcacaactctgttcacaatcaaaatatcacgtccgaaaagagagtcggctatttcgaaaaaatatttaccatctacataatgcactttgaaaaagccgtccattgttttggctttgccggtgattacttttgcgtaaggttgcagagcatctttcttactcttggcaatggagtcagccttggctttatccaccgcttccgtcttgctcttctttttcttctttttcttgaagatgtccgtcgattgtgctccggccaatgggataatcattgccagaatcatcagaattgaaactaatttcttcatgctttcttttttaatatttatatacagatacaaagataataattattcgataccggcaatgccatacatatttaagttgttgatactagacatcttttcattcggtttgcctgaaatagtatattcctgtccatcaattgtcaaagtaaaattataggtataagttagccctgtttcaaaaggtacggcaatcatcatataacaggtctccaaactggcaccaaaatacccggcagttatctcgaagccgccattaggaagattataagtaatactgtttatcggagtaccggaaattttacctgtcgacaaatctacagttgctccatcttcgtaggcaatcggatggtcacagctcaccaccactttagtaaatttcttaccgacaaaagaatccgggcatcccgcacccggtaaagtgatttgagaaaacaatggtttgaattctcccaaagaaacagttgcagcagaatagctagatgtagtagccgaagcataagcaaagctataattacgatgcggcataaactctgattcataatactcctgcacagctaagttgggcaaagcgacagccttataatcttgtgaagctgcgttatagggcgtataggcataaatagtgtgatcgccacccttaaatcctgcagcaagttcggaagaaggattcagcgtaatatcttcagtcacacgactatcacgatcatatactatatacgttttaccatccaattctgtagtagtagccaccgctacttccgacggagcatacggcaagttttcctgcggtttgccatcggacaacacatatattcctatcttgtccgcttcaatccatccctggcttccatgggaatacacattataagcaccggaaacagcaattttccccactacgggaatatctgcatcttcttcttcaccatcgtcactgctgcaacttactgaagacaatactaaagctacacaagcagcaaaataaaacagtctatttttcatacttttctcgtttaaatgattaattatttactgataggttattttctttttccaattaatattctccttcatagttcgtgcaccataccatgcctttcacatcgccaaacccgctaaaagtcttcaattccaaatcgggagcaaaaccttcgaagagacgtaccatctggctcgtgtttacatcgatgatggcgatatccccattttcctgcgaaagtgccagccggaaattcggatcagtgctatttcccccatagccataaaactcacaaacaacaggacttccactgatgccggtgatacggctgcccgctgtgtaagccagcatatggctgcgcatctgcatactgtatatatagagattcttatctccgtcggtaaagtagaaataagggttcttttcaaaattggaggacatcttaatgacactttgcggagtcaataaggagctgccgctgaatccgtattgatccgtaccggttatcaggtgagagttattatccatgtcttttacggcaaactcgtgcaaatcataatttccggttccctgcacgtcaatcagcgacacgtagtttgaccaaaatgtcagcccgccgttggaggctacatctttcttttcgtaagcgcctattgccaggcagtgggttcccgctcccatattgttcacccgcaacacaccggagggaacttccaaatcctgatcgtatgttttgaagtagacgatggcaggagtataaactgctccccactgcggataatgtgtaatgccgataaaacgggcattttgctcatcatacaagatacaacgttcttcgtcggcacaccaataagtgacgttgtggaacggtgcgaaacaggtgatacggctacctccctcaaactcatacggcatgacgccgtacttcccgtaataaggaatcgctttattgtcagtgcctacggcacggatatacacttccccctgttcggagcaaatcacgtaatattcttctttgaaagcgaggtccattatcttcaagtcatccggttctttacggttctcgaattcgtcggcaagccacatgtctttttgcaacaaattaccgtccagcgtgacacttccactgccctgatttatcaggactttcggtaagcccgaaacgtaggaaccggagatagagcctaatacataatagtagtagattccctgcggatctgtacctaaaccaccttcgatggtgctctccacattgtgcgtcacccgaaaggccggattgatgaaagacaaggcagattttccgtctcccttatcggagagaatcatccagccccagtcgaaactattctttcccgtcagggtgtatttattgctgatatacgtttcgttcgtttccttattgattactttcagtatcagttcgtatgtcccgcctttctcgaactggtatttcagatgatagccagtgtagatcagttcacggttcaggtaccattggacggtgaaaagttcgtctacgtttccgatgtcggttgagaagttgacgggagcatccatctcgaaaaggtcgcctaccataaatgtgtagtccgacgaagcggagttcacaaaagagactttggtagagtttgtatagccatagtttcccaaatcgtcataacagccggttatcacgagaagctgcaggattgaaatgaatagtattgtttttcgcttcatagtttattgtcagttatcgagaatggtttcatacagcggtgtcactccatctgtatcataatattggtaattgccttgctgccactggtctttccaccaagccttgaagtcggctatcagattgacaaactcaatgccggtgtatttatccaatgattcgagtatctcgccatccatgaaaatgataaaaacacggtatttcatatccgagtatactcccagattggccgctgaactctggctccaccacacagggcaggaaatccggtcggtcacttgaatcgtgacgtattgatattctgccgggcctaccagacagttttccactgcatccagcgaaagggtaagtgtatattctgtgttgagcagtgcttcattacgatagacggtgacttcgtaggtgtcttctgccagtcctttatggaagatgccggaagtcaaaggggcataatcgatgccggaacgggcggtgctcttctctcccactgcggaaatatcacaggtagcattttcttcgagcaggtagccaagaagtgtcattttcactttcacggttccttcccgaagcaagggtgcatccgtagcaaaattgaatgttattttctggggagacttatcgttcatgtaagtaaaatagacgtagttgtctccatgataaacttccagttgctcttcgctgcaggaggcgaaaacaagcagcaggcagaaggtggtatatgtcaatattcgtttcatcttatccgggcattagttggttgtttcactggtaggcaatggaagtacataagaacctgtcatgttgatttctccttcctcgtcggaatcgggcacggtggagaggttcatccgtttgtaggtgtagaaggttccaccttcgcctatcatttctttccgtatatcgagcagtatttcggcatccagttgttcacgggtgctgactgtcagactaagggtacgttcagctccacgggcttttcgaactgtttcgaggtagttgattccttcggttatcttgccattatagctactgatctccgccaggatatgacagatttcactgaaccggatcactggtatcatcggattctccattgcttctactactgattctacggaagggttatacttcagtgtgtaatacttcgactgggtttcattggtagtcccgatcaggtaggtgagccgatagtcggtatatacacccgtgttgtccgaagcaaacagggaagggatatttgccaacggcaaacgggtggttgacgaagaagaggaagagccccatacggcctgttcataatccgtagccagctgtttcttgtacaagccgaacaatatgtcgtgggagacttttgtatatcgggaattgagattgcaggtaatgttctctccttctgtaaagcctatccaccgtttctgctggtaataggtgttgtaaagttctttggcggctgtctcggcattcttgtagtaggcaggaccggcatagatgcagacacgggctttcaaccccagcaatgccagatagttgaagcggatgccacgataccagaagaatgctcccatatcgtctatataggaaccggagttgaagcggtagcgggcattccattcgggagtaggttcgtacatttgtgaagcgtacatcgcttcgggatggtattcggtgtcaaacttacgcagaatgtcttccgcttcgagcaggtctttcaggactttctcgataaaatcggtaacagtgcatttttctaccactgcggcttcgtatttatcgcggtaaggaagataggagcccgaaggattggttgccgttgcaggagcaaacaagcgaagcaggtcaaaatgtatcatggctcttaatgacaaggcttcggcgtaaatgaggtttttctcttcttctccgtattcgaacaaagagatgtccgtgggccggatgttctcgatgagcttattcaggttggctatcactttatagcctttttcccagatagctgtcacgacgggttcggtgtcgaccgtgttatagataagttcggaagcgtcggcatacatcggagagatggttccggccttttgattgtattgctgggagatggcactaaggaatccccagcttagttgcttaccgtaaagttcgtcggacgccagattggtgtagataccattcagggcattccggtagccgaaaccggtggaaaacagatcgtcgtcggcaatcgcattgtcgggcgttacgtccagccaggcattgcaggaaacggctaacattcctgtcagggctattagtatatggctgattagtttcttcatttgtatggttagaatatgatgttagtagtcagattgaatgaacgcgaataaggataatccagtccccgttcctgacggatggtagaccaatagaacaggtcgttcatcgtgaacgaaagacgcaggtcggacagatggagtttctttaattgttcgggacggaaattgtagctcattgttaatgaactccattgcagggtattgtttttctgtacaaaacgcgaagatgcgccggtggtgacattacggtcacgaatatctttcatggtggttatgtctcccggtttctgccaacggtcgagcaatacccgcttatctacattgtcatttttaatgtcggcattctctacataggagacgagggtattgttgtaagcatctccaccaaaagtatagaggaaagaagcaaacatggataactgtttataggacagggtataaccgaatgagccttgtcccttgggagctgtatcgccaatgatggtccattcgtcggcagaccatacatcggtaacgtcaccattccggcgaaggtagatttctttgccgtttgtggggctgattcccaatgacttcatcccgtagatagaggtcagagaggctccttcgtaatatttcaggtatgttttagcatattttgaatcggagctgctttcggggttatatccgctgaacagttcttccactcttttattatagtcgcgcattgcctgggagatttcaacaatcgtgtttttgtttcttgcaaagctgccgtagagctggaagagccagtttctgtcactgtaaaatcgtgcccgcagttccagttcgacgccggtgtttttcacctttcccatgttttctttgtaggaagtgaatccggtagaggaagggatggtataatcggttatcaggtcgatggtacgctcgtcgtaggcagaggctttcagatagattttatcgtgccacagtccgatttcaactccatagtcgagggtgtatttacgttcccatttcaggttcggatttcccatctgatagaggaatacaccgtagcctgtgggataccagctgtctgtttgcagctgatacatatctttggccgaatagagggagaagttggtctttccggtcagtccgtaggaggcacggaacttcaacatggaaaagagttcattcgacttcataaaatcataattatgaatgttgattcctgctcctgttgaccagaacatggaccatcttttatcggaaccaaattcggaagaaccgtcgatacgtcctgtaaggtcggcgagatagatattgttgtaggtgtagttggaagtgagcaaggctcctaccaagcgggtggtattgtcggagctgctgggctttccgtatacttctgccgcatagtttgaagagacaaggtcgccaccagggaatccccggtaacgtgtttcggaagcagtgctctgcgtttgtctcatgttggaggacaagcagatattgagattgtgtcccttgaaggtattgttgtacatgagtgacaggcttccgtctatcactgttctcttttgtgtggattctgttttttcaccattgatgttgcctgtactggctgaataactggccgatgcgggatctttgtacagatcaccggtagaatttctcatcaggacggaaaactgaccgcgcagacgcagaccgtcggtgatacgccaattcagactaagatcatcggttacttcatcataaccggaatggtcgaagctgttgtagaagttgatttcgtacagtggatttacttgtgtgccgctagccccgtcgaacttttcgagacggcgcacataatcgccattttcatcatacagacgcatataaggaagtaaatgggagtaatcgctgaatgaattgaaggggacatctgtacttttgttataagtgtaggtcactttgttctttatttgtagtccgccaatgcggtagtctacataaaaagcggcattggcattcttacgggaagagtgtttcatcactccttccgttcctctgaatcccagttccactccccagcgcacgtcgttttctccaccgtctatgaaaacggagtgcttatggttcagagccgtgcgtagtccttgagaaagccaataggtatcgacacctgtcagtacattattgagtcgttggtagtaaccgttggtataggggtctatttccggggtgttgctgtcatatagtcctgccaggcgttcggtttccagcttctcacgggcgttcatcagattgtaggaggataaatccggcagttcggcagaaagtactccggaatactgtacacggaactttccggcttcaggcgcacgccgttcaatgacaattactccgttggccgcacgtgaaccgtacatggcagtggcggcagcatctttcaggatattgatgctgtggatgctattcatatcgaggtcgtatatcttttctacatcgacttcaaagccgtccagtatgaagataggcaggttggaattaccgcttagcacttcccgcgaaatggaggaggtggaggtctgcccaagtgtcgtttctccgataccggtctgaccacgcaagacgaattgaggcaggctgttgggatcggaaccagcagccagattctcctgtattctgaaagagggatcgaaagtctgaatggccgaaatcaggttgttcgggttgacttttaacaggtcttctttctctatctttgtggtatttcctgtgaaactttctttctgtatggagttatagccggttacaatcacttcctgaatactttcggtagcttctaccatctgcacatcgactttctgccgggaagtgactttgattttacgggtttcaaaaccgatgtaagaatagataaccagaccgcctttttcgggcagggtcaatacatagcaaccgtttatatcggtaattacaccagtagaatgaccatccaaacgaatcgtcactcctaccatcggttctttagagagtttctcaatcacccggccataaacataatttccgtgtggaggaagaagatatgtctcttttgaattatttttgttttgggctattgcattagtagatagtgataaaatgtatacaaacaataagattctattcaaagccccggaatttagcttttgcataacggatatatatagttattacacccgcaaaagtattcttatatgatagacggagcaatcacgaattttaggtattttacacaactattataccaaaatataattaaagcaaaatctttttgcttctgtttaggtattaatcaatagcaaaaagaataactgcatcatttatcctctatcaaaaggcaaatgatgcagctgtcggttatatctgttttttttataatgccagacggtatatctctttgctgtcctgtttcgctaatttgacatagttgcctaccaattcacctttattccggtgcagactatctgcaaggcggtcgatgtcgggattctcaatgccaagttctttgaaggtcacaggcaggccgatggaagtaaagaaggatttcagacgggaaattccttcaagggctaccgcctttttatcgtctgattctgccactccccacactcggatggcgtattgggctatcttatccacattgtgttctgtcatccatgtcatccaggcagggaagattacggagagtccggcaccatgagtcacgttatagatggcgctgatttcatgttcgaggaagtgggaagcccagtcctcttcacaacctacaccacaggttccattgtgggcgatcgttccgcaccacatcagattggcacgggctccgtagttttcaggttctttcatgacggtggttgcttctttgatgatggcaagcagtgtaccttcgcacaggcgatcgcctatttctacatctttcgtgttggtgaaatagcgttccatgatgtgtgccatcatatcggcaatgccgcaggcggtttggaaaggaggaagtgtgtaggtcagctcggggttcatcacggcaaaaacaggacgcaatacaccgggagcacggaggcttaatttctgtaagccatcgactttcgtgatgacggtgttaccggaaccttcgcttccggcagcaggaatcgttaacacaacggctactttcaatgctttcgtcacaatggcttttccgatgtagaaatcccagaaatctccgttgtaaggaactccggctgcaatggctttcgccgtatcaatcacagagccaccaccaacggcgagcatcatgtctacgttttctttccggcagaggtcgattccttcatacactttcgtgtctatcgggttaggctgtacaccgcccagcatacaatagggaatacctgtttcctgcaatgatttctcaacacgagccaataatccgctgcgtatcacagagccaccaccataaacaatcattattttgcgtgcaccgtatttctgtactaacactccggtctgcgcttccgtatcccgaccgaacacgaattcagtagggctgtaaaagataaaattattcattgtcgttttctttataggtcttttcgtcagtcttttctatagatccaaatagaactcctttgacaagtttttctataagttcttttatagagcccttcataagagtctttatagatcagacaaagttataaatttaagcagaatatctttcttttgattgtttaaaatttcctactttcattagtacaagtccgattacaatccagaccatttcgcgtacacgggtaatcaaagcggcatagactccgtaagctccggaaagggaaaggccgcctacggcgagggcaaagccaccttcacgacctcccaattgcataggcaggaaaaacagcagattagcaagtaaagaagagaaagccgcaatcaagcagcagtcggcaaagctgacatgggtggtcagcacgttcagtatcagccatatttcaagacaactgactacacgggcgatatattccagtaagagggcgctataaaaggtttgtttcttttgttggtggagaagggcaatttgtttgtctatattctccaacttctctttatgcgcatttgcaaaatgaaatactttctttttcagaaaaggaatacgaccacccatacggacaaaagccacagccatcccctgccgatagcctttcataaaaagaataacaatcagcaagcaaaagacagtaatagctcctaagattatccccatcatccaccccaccggatagagacaaacgtaaagcaacactgaacttaaccaaaagcaaaagtgggaaaagatatgcatcatcacataaagaatcacggaagaggtggcgcgttctattcctatatagggtttcagctccataatacgatatggttcgcctcccatcagcccaacaggagtcacgtaattaagcgcaaaacctgttactgtgaatttgtagagccggacaaatgaaacccccgtcttaccaccactacggatgatgatgtaccacgatactgtattaataaggtagacaaacagccatagcaacaaaaccaaaggtaaatatacccctgcacgcttcaaattcagccaaagctcctgataatccatatcaaaagtgaatatcattatcagaacggcaatgataccaaaagcgagaaatatattacggtacttgttcttcactatttgtgagacttatatctattttttatatgggtatatatctgcttttatatgagtatatacttgctttttgtatgggtatatatctcactttattcacatataatcttactttatatacgtataatatctttcgaagaatcttttgaacgccgggattctcatcaatatgtattcgaataccagccaaccgattaacgcgcaagagatgccaagtaatacatcaatgatataatgatggcatgaataaatagctgttccccaaatgccgaccatgataatagagaaaagagtaaccacataccacctgcatttaccaataatggcatacaccaatgcaactaccatataggccgcgtgcagtgaaggcactgccgcaaaaacattagcattacgcccgtagatagaatcaaagatggttactccgaagaatgcatcaaagcgtcccaatcctgcaacattacccggtgtgtttaatatcggttcgaaaccgtagttgatggcataccaaggcggagcggccggatgaatataataaccggcaaaaccaatcaaattgacaaacaagaatactaacgcaaagcgaaggtaggtttttctttccttcttgaaatacaggcaaagaccgaacaggatgggaacgggaacccaacaaaggtagaagattccggcaaaaacgtccgctatcggccagttgtgtgcagcgaagtattcgcaaggagtaaccagaagaccattatccattactccgaaaagagacttttcgagattatacagtccggccacatcaatcgggttcacttcgtagttggggcaaatacgcatccagtcatacgagattccaaaaatggcgaaaggtaacagggccacagccaacttacgagtaggtaatccggcaaaaaataaaactaaatagagtaccgccattaacaggtgctcggaacgaagcccgatgaagatacttgtcagcaaaaggaaaagagccataatgactgtcacagtcagggcttctctcttcgacggcatttgaatattctttatcattataatgttttgattagacaactagactatttactattggactatttacgatgtactatttaggatgtacgatgtaaatagtaaatcgtccaacaataaattaattcattctttcatcgctttgtagcaatgtctcacacgagcaaatgccgtgatattggcaaacagggcaacaaaagccagaggaacaatcataatcaggattggttcgaaaacggtgatatctttgaaaacgccacagaacaaagctccgagactggtcagcactacgcgttccggacgttgcatgaatccgactttacattcaattcctaagccttcggcacgggcacgcacgtagcttaccatcagtgagccgattagtgccacaaatgcaatgagtgcataaaggaaataatctttcattgataaatagtaacagataccaaagaaagtcatcaattcactgtaacggtcgagtactgaatcgtaaagcgcaccgaacttggaactcatgttgcctaggcgagctacacgtccgtccatcatatcgaacagtccggcaaacaaaatcacacctcctgcccagccgataatggccaaatcgttctgtccgccatatatgccggcatatacaaacatacctgccgctactacattcaggataaatccggtagtggtgataaagttaggagtgattccaattttaatcattccgcgtatcaggggattgataatcttataaatcaactgttgtaaataatctctgtaattcatctgtttaaatctgtttatagctatttttatctaaatcttctgttttctcaatctgtatatatctaattctttcgttttctcatcagtcttttcaatccgtttttcagtttctttttccgaacaaacttcttatatctatattccggtaaacaaaaaagcgttgcatattatagttccagaacagtgccacgatgactgccactaccactttaggaataatgaaaaaatctccgaaatacaggctaagcgtgtcgcgtacccagggaatcttcgctaatgattccgtcagtgcatacgtaccccacgtgtttaaccaaacgctgcaaatccatacaaggataaactttgcagcgacattcgttttctttcctttcgatttaaaggtccatttatagttgataacacaattgacgattcctccataaatagcccccgccagggtggcatatacatagtagacttcaaatagcctgaccagaagaatcgtaacgagaaagtctgcaatagttgccatttgagcagaaagctgcgccctcaagaacatgaagatgccacctttctgggaaatcatccgtgcaactcttttcagccaatcacccatcttgctcccactaacaaaataaaactatacactcccgccaaaacgtcgtccatcatcacacctactccacctttcaggctttccatacggcgtatgcccaacggcttggctatatcaaagatacggaacagggcaaaagccgcaatcacataccaaaaccatttgtcatcattgggaacggccaacaacggtatccacactcccaccatctcatccactaccacacgcgaaggatcttctccccaataagtctccagcttatcggcagcccaaatgccggcgaatgtaaatacaatcaccaaagcggcagtcagccataatacccaagagaaaggaaagagaaaataaagtgcaatccaaatgatagaagccagtaacgccccagccgtgccgggagcaaaaggagaaaaaccggagccaaagcccgtgcctataaaaacaggtagaaagggaggacgcttcatttattactaattactaattacaaactacgagtcggttgtgtcacgagtcccccaaacgaatggggaatttgtacaataaaaaagtaaaagttgaggttgagcatccaccagtctttataggatggtaaatctcaatctcaacttattatttggggttactgattaagctaagtaatcaggttctttttcaccaatcatgttacgcaatgtctgttttaccattctccattgtgtaaacaagtcgtgttcgggctgatgttcgaaatcgtgcatcgggctcttgcagaagaatgacaaccaagtctggatgccacacatacctgcacgcattgccaagtcgctgaacaacacaaggtcaagagcgataggagctgcaaggatagagtcgcggcaaaggaagttcaccttgatttccatcgggtagcccatccatccgaagatgtcgatgttgtcccatgcttctttgttgtctttgcggggaggatagtagttgatacgtactttatgataaacatctccgtagagatccggatatttttccggttcgaagatagtgtcgattacagacagcttgctgacttcttttgtcttgaagttgtccggatcatcaagcacttcaccgtcgcggttaccgaggatattggtagagaaccaaccgttcacacccagcatacgggttttgaacatcggagccaatacggttttcatcaatgtctgaccactcttaaagtctttaccggagataggtacattcttttgtttagagaattcccacatagcaggagtatccacacacaagttaggagcacccattacgaacggagcgtcttctgcaatagcagcatacgcgtaacacatactcggagaaatcacgtctgtattgttttccttcattgctttctctaaagcagcgagtgacatgtgttcgtcagacagcggaatgtaaatttcagtacttgcagcccaaagcaccactacgcgttcgcagttgttagcagctttgaagtcgcggatatcctgacgaagttgttctaccatttcccaacgggtagcagccttcttcacgtgtgtaccgttcagacgttttgcccagttgtgatcgaaagcagccggcatcggtttgatagcttccaactcttcttttactccattcaggtctttttctttcaaaacctcggcgtacatagcagcttcgtatgcgttgtccgggaaaatatcccatcctccgaaaacaatgtcttccaaattcgtcaagggcacaacgtccttgatgagtttttcttcgttgttctccatgcgcattgtggctaactgtgtaatagatcctatcggttttgccagtcccttgcgagaggctagtgtacctacaatcatcgtggtagctaccgcaccacccactccaactaccaatacgccaagacgcccggtagcgggtttaatttcttgtttcatttctattctattaaaattaaactaaaattgatgcaaaaataagattaattaattactaatacggtctttatttgtcatataaacattgcaattagcaggatttaacttttaaaaggtcatgtggagacttattctcaagcctgatctgtcaatcccgggcgaatcacgataagtgagcctccagatatagtccaaacgtaacaccttgaaaatgttttcaataccgacacccgcctccacataaggtgtttttcccattgtttgtgtgttctctatcggaaaagcgaacaaaccgtcactcaaagccgggttgtttttatcgctcaaatgtccatataatccacgacaggaaactatttctctccatttaagttttttcaacaacggtacccggttgaacagccatccgttgaggaaataagtaacatcccacgagaaatactcatcgttcataaactccatcgcattcatcaacgagtaagattccggttggatggtataagaaaggttggcattaggcatgataagcaacgggaaaggtactttatcccacactttacctgcttttagtataacgtccgtatagccgaacgcggaaaaccagaagcgtttctgaataccggcttcggtatgattgtaagtgtaatcgctgcccaacgctccttttccggcaatggtatgagacaaggtaaacaccggtgcatccaacgatacgggaaaacggttccattgagtctggaagaatttctcattcggagcataacgcaacttcaactctgcggcactgatagagaaatcttttaccggggtgtaggtatctccttctttctttaaaaaaggaatcaggtaggaggactcatctttccgtgtacgcgctgtcaactggaaagaaaagccggaataaaactcattggtataggtcatctccgcctgccggaaatagccgatacggtcgtccttctcacgtttcaaggccaagaacacattgtctttgcttgtatacaggtaattttgtccatactggttcacatctgattcgtaacgcaatttcaatgaatggatgggaaattcattggcgtattctttcttcttcttgaaagaatattccagttccgccaatcctttcactctttcatctttaaacccgtaagccacatatcctttgccaaacaggtgcggattgagccaggcggtagtcatacctccggcacggatacgggggccttccaatgtgttaccgctgatagtggcattcatcgggccgatatagaaaagtggcgcttctttggaggtaggaatatatcccgtgaagagaatggaaagcactttctccgtccagtaatacaccggataactgcgtaattgtgtcatcaggcggtctaccgagttttcctgctgggagatggcggcttgcggacgattctccgcccagaatgtttcgggacgcgacagggcttccgtctcttcaataatacgttcgggtttggtgaaggctttgtcggcttcggcagtcggcgtaaaggtgtagttgctgtaatccgctacccggcgggcaaaaataccgtcctgtccttcggtcagtttaaactcaacagtgatactttcatgatcgagcaggcgtgtgccgtcttcagcgcgcttaaattcctgttcgagcaacatgtagtctacaaagttcaggtttatctttttgggaaagttgaatacggcacgtttaacaaagtaagtagagtcgagcgtcacatacaggtgtccgttgaaaccgaaagactcggaattaaaaggcgtgaaagcaaggtctgcacaaggctctccggcaatctgcaacgtgtccatcaggtaatatttataaaagcctgtgccgatacgggacaagggactgacaaacttattcgtaaacagggaaatgttgttttcgtagatatcgacgtctttaaagacttcattgatggctgcctgcatcccttgtttagaaagaaactcatcgacaccggcctgtttgcgtcctttcacccattgcttctcggaacggggagatttccggtaatagtctgtggcaagcagttcacgggctgataccgtcagaatcggtttaccggtaacggcagaagtatctacatattccgtcaggaaatcaaatttacgatatagccattttttctgtttctcttcatcgaagttattcaacgcaaaggtggtcttttcataacgttcgcgttgccagaagtctttctcgtagggagagtagttgtcacggctttcaatcatacggcggacaaattccacagcaggattatctttcttccggtagtgctcacgtttgggtttgactaccacttcaccaagcgcgtattcggtaggcgcaagcgctactttataggatgcattacgggcagggcgaatggtgcggacatagtcattatatccgattacagagattacaagcactgcttcggagcggtgggttttgaagtaaaagcgtccgtcgcttccggtagtagttccttcggtcgtgtcttttaagcgtacagatgcataaggcaaaggttctttggtcagagaatcagtcaccaccccttgtaccacatactgcgcactgagcggaatactgatagccaataaaagaaagagcgtcaatgtgccttttttcattaatctcataccttaaatcctattgaattgagcggggcaaaggtaggagtgatttcaagacaaaaaaaggtctatttgacggaagaaatgttcttatttgacacaattaggggaaagtaatacggaatcgggtcagtccgtcggcataggttcgcaaagagaatgtgcacccatgacgcatcagtacttcgcgaataaagatgagtccgattccctgaccgttcggtttggtagagaagaaaggactgaacagtttagcttctgtttctttgctgattccctgaccgttatctatcacttcaacagtggccggagcgagggtgcggactattatttccccatcggcttcaatgctttccgctgcatttttgatgatatttacgagtacttgctcaaacaaagcggcatccagcatcacatctttcagactttcgtctatttccatgcggagtgtaatgcgacggtcattacacattccttccataaaccgcttgcaggtgaaaaccaaatcattcagattgacagaagagagtgtcggttcggggattttcaccacatcggcaaaacgggtgatgaaacgactcatcgagaaacaacggtcggtacatacacgcatcacgtcgcagatgtcttccattccttcttcgcaggaaagggcttgttctaccgtatccagtgtggaagtaatgccggcagtcgtgttgttcacttcgtgggcaatcatgcgaatcactttctcgtatgctttcttttccgctttcatcacttcgtcggtgagggtttctaccaagtagaagggatgctgaaatccacgatcaatgaaagaagaatgagtacaccggtagatattcgagtcgttcagacggacggttaccttctctcctttcgggaggttggctaattccaccgctaacggagaatcaatctctttcatcttcttgccttgtacgtcttccaaacgaacacccagcattttcaaagccatcggattcaattccgaaaggtcttcatcaagggaagttataatcactcccattggagaagctttaatcagcaaatcgagaaaattattctgttcacgcaggcggagacgttcattctttagctgttccatcatgcggttgaagatattcaccacacgatcggcctcatattggcctacagggctaagacggctactgaaatcctgctcacgcaacagttccataccgcttccgattgtattcaacggcttcacaatcttacgatagaaaaaggtcagataaatgaggatgaaaagtatcagcccctcccctatgtagaaaaagattgtattcagttgactggaaaggaacagcaatacactacctaatgccagcagcagaaagactagtatgtaaaagaatccttttatacgcacgttatctgtggttaacggttaatcttaatattattaggcacgtgcctaaatttatcacattgttatattatatttttcgagacgacgatagagtgctgcacggctgatacccaatgccgtagctacctgactcaaatttcctttgtaacggtccaacgcctggagaatggtctggcgttctatttcatccaaagtcataccgaccagagctgcgccttcggtcactcttgcgtcatcgtggcgaatatactgcgcatcaaagtcggaagcatcaagcagcggtttaccacttaccaaaatggtacgttccaccaagttcttcaattcacgaatattccccggatagggcaaacggctcaagaattgcagggcatcggcagagaactccgtacggggcaatccgttggttaccgcctgacggtcggcaaaatgacgtgccagcaagggaatatcttcacgacgttcgcgcaaggccggcagtttcactgttatcagattgatacgatagaagaggtcttcacgaaaagtacgttcgcctaccattttgcgcaaatcggcattggtggctgatactacccggatatccgtcttgcgcggacggctgtcgccgagcacttcaaatgtctgatcctgcaatacacgcagtaacttcacctggcacgaagggtcgagatcacctatttcatccaggaaaatcgtccctttatttgccatttcaaaacgtccgatacggtctgcggaagcatcggtaaaagctcctttcttgtgcccgaacatttcactttcgaacaggctttgggagatacctccaagattcactttcacaaagggatgtttggcacgctgactgttgatatgaatggcctcggctatcaattccttacctgtcccgctttcccctgtaatgaggacagaggcattggtctttgctatgcgggcaatcgtattcaacacatccatcaatccctggctacgcccgatgatgtggctgcggtcgaaagaatcgctctgttcctgcgttgtttcctgtggagtgcccgaaagttggagtgccgtttcgatgcgttgcaacaaggcggcattattccagggcttcgttatgaaatcaaaagctcctgcctgcattccttgcacggcaagttggatacttccccaagcagtcatcaatatcaccggtgtttcgggacggaatatttttacttgtttgagtagggtcaaaccctcctcacccgttgtagaaagagtgaagttcatatccatcaggattaaatccggagctacggaacgtactacttccatagcttcccgcggaccgggaacggtctgtgcttcatatcctgcccgcttcaacatgaagctaagcgaagaacgcactgcactgtcgtcatcaattatcagaatcatagttaaaattgcaagattcctctaccaagaaaacttcttctgttttttcaatcttccaagaagaagtatttctttttttatttctttctttatttataatgggggatgaatttttctgtattatttacgtatttttcatttcccgagtgttaaaatcgagtttcaaaggtactataaatagttcgtaataccaaatgaatcaggcataaatacgcaatagtctgtttgcagacttgaaaaacttttcccataatctccggcaagttcctccataagattcaaaagctttttcctcccctttctattgccggatgatttcatcaaaatcagcttcaagttcggtattggtacgaaaatcccatagtgtcagactgcgaatctgataataataataccaataataataaagttcggaaatatgtttctgtctcgcatcatctttagagttctgcgcatcattcaaatccaaggtattgattttacctatcaggaaagtttcaatacttgttttatatcgttgctgggctatcgcatcggcttctttggctatgtccaattgctgtgcctgattattgaaatgctccaccaacagaaaaatatcctggttgaagtttatctgttcctgacgaatttttgaaagcactacatcccggttactcttggctacccggactttcccacggcgttttccccaatcgagaatcggaatcttaacgcctacctgaacaatctgattgtcctgcaagttcctgtaaacggccggaaaattccggttctcacccgtataccctacgcttgcaaacaaatcgacactacgcaaatttccgcgtgcagtagctacttcataatcggcttccaactggcggcgacggatattctgtgcaaaagaattacgttccaatgctttatttaacacctgattgtactccatcctcgggccatccacagcttcgggaagaaccgggtttagtacttcatcctctcctactcccaaaaaggcacggagctggaacatcttggcattgagatcactctctgcttccgtcaatgcagccttcgcattcaaagcggagagcttcaactgcaagagttcattctcggaaatctgccccattttgcgtttggcaagggctacttcataaaggtggtcggcgtttgtctggttctgtttcgccgtgccaagattttcttttgccaacaaaagattaaagtaataagtgatggcacgcatcgtcacttcttcggtagcagtgataaaagctgctttcgcttcggcataacgaaccggttcgatgcgtctgttccactttatattattgactccaaagatgggttgtgtaagttgtaatgtgacaggaaccgacataaaatgacggtctcctccggctcccaattgcttgatatagtcgagagaggaagtcagcgaaagtttaccaccggtaagccagatgttttgatcgatagaaagatcaccggtaagccccaatgtgttattacggacgaaaccgtaagaaccgtccgaattttgataggaactatatgatttgttataattgggcagggttccggtcaagttgacttccggcagaagatcggcacgaaaggtacgaaattcccaataggccgttttcaattcattcaaggcaacagcagcgtcaacagattgaatacgcgccatagcaatagcttcattcaaggttatttccctttccttctgtgccgacaatgccaacggcaggcaaacggcagcaagagcaaacaatatacttttctttttcattatgcacagtattttccactatgagagaatcaaacgatgtgccaaaaaagtaaagtttttattatcaacagattagaaaataagaaaagtgtccattttcggacactatgcccaaaagtgaacgttcgattattcgcagtagttaggaaggcgcacagtgaaacgagtgcctttacctacttcggaggtgacggagatggtaccattcagacgttcgatgatggtctgacaaatacttaatcccaaacctgctccttgggtgaaattatcgactttatagaatcgttcgaatatatgacggataccttcttcagaaataccgactccggtatcctccacaaagatgcgggtgtagccgggaacctcatcatcttcatagccgaaagtaatgaaaccgctgctcgtaaatttagcagcgttatttatcagattattcacgacttgctgcaagcgtacattatctgtcgtaagatatttcttatcactttcgggcatacgcaacaccagttctactcccggtggcatattcaagcgttgagaatcatggacggtctttaataacagcggcaggttatgctcggcgaacataaattccatggttcccgattcgatacgtgacaaatcaagaatatcattaatcaaagccagtaacaggccgcaattcttattaatggttccgataaactgggcaatctcttcgcttgtaaaaccactcgtatcgcttagcaaatcggagaaacctacaatcgcattcaacggagtccgaatctcgtgactcatgttggcaaggaacgccgatttcagtttgtcagcctggagggctttatcacgagcctctctcatctcctgctcggcagtcttatatcgctggatactctggcaaacacctaatatattgtacaatgaatcttgtgtcaatcccgtgattacggaagaacgatattcccaccattcatactctccgttgacattccgctgacggaaattcagacgggtattagaatcttctcctgtcaatgctctattaaataacggacttatttccttcaaatcatcaggatagatagtgcgatccatttcatcacgggagatggtagtaaccgattcatcgtatccaagacgtttcaagaaaccttgcgggaaaatgaaacagttggtttccatatcaaactgccacggatagatggagctttcgtctactgccatatcaaagaaacgcttctgcatttcttcattcgaaatattccgtgcggaaagtgccataccggtaatcgtatcctttgaacggatcgggactatttcccccgacaccgggaagtatttatcactatgcacttctttcatgaaagctccctggggtatcttcacactttctccttttgaagctacctgcttcagcatagaatgaagaatatcctgaccgttataatatatcttgaagatgctgcctgccatcattccttcataaaaacggccccctgactcatacggcaaatgcagcatttgcaataaggagcggtttgtgaaatgaatgtgcaaatcggtatcatacgttatcacaccatcacggatggaatgaaatacattatcaaactcattacgctgttccacaagtttattctgcacgagcagacgagtctgtgcctgaatccgtcgtttggactcacgccggttggcacgcatcaaccacacgatagaagctatcagcaacgccaggatagacggatagagcagtataaaaagatatttatatttttcccaatacggttcgttgacgatggttccgctagaggatactttatcagggtcaatatgaaaataatccaactgtttatagtcatagatgaatccctgcgtgatttctgtcactcctatttcttggggagatgtaccttttaagactaaagcagccctttgagctgccgataatgctgaagcataactatcggaatcgtatgcacagaatacgccattagttaaccccacattctgactcgaaaatacgggagcttttgagtttttgccaacgaatgaaaggaaaggcgaccatttaggagcaaccaccagacgttcgtagctgttacgagggtaacaaatagcagcaatgatgtgactcgttgtatgattttgggtattatagactttcattctataatccggattgtctttttgaaagattttccactcttcttcaaaatcttcaaggcctttgttactcaaaaagctgttatctatcacacataccacttctttccgctggggaaatatcttttgcgcctgacgcaatatgacatcaaaatccggattggcagtgaacccgcaaacattgggatgagtagcaatcagctccatatcaggatacttaatgccgaaaaacacgaccggtatctgcaaaggcaacgaatctccacaggcaaaaagagtatagaaagcttcatcacttgctgttataatcaaatcggtctgcctgtcacgagcacgctgacaaaaacgacgcataattactttctcggagttgaatgcccaaaaatcggcatcaagatactccgttgttatattcaccttcaggccactttctttaaatcctttgaccaacccctgattaaggtcgctatgccaaggagtctgtgaggtgtatgactgtataaacaggatattgtatgtacgttccgctgctgccgcctgaataagaacagcaaaaaacagaacgataagcaaacaatagtagcgtcgattcatataattaaagcctgcggtgttttcaatattatgccgacaaagatacgttaattatattgaaaacaaacagatagcccaagttttttattcttcgcgcaacgcctcggcagggtgtatgcgaattacctgacgagcaggaaaccaaatgccaacgagaatcattaaagtcatcaagaaataggtaatggcacatgtgataagaaaacgtaccactccccattccagatatccttccgtcaaatccaggtagccgatattataacatatcacagcagcaggcaaagcggccagcgttaacagtaataatccttctttattcagccgttgccaaagctgtatccggctagacccaaccgctatacgaagcgccgattcagcacgacggtgctgtgtacggaaccagaatgtgccaacaatacctaacaggatattgagcagtaagaatcccatcatccagaaacgtacctgtacctgattatagctctcttgctggaaatcattccgtatatcttcataatcatgcactttcaagatgaataagttgccgacactcaactggttgacagacaatttcatcaaatgttccgcaaagtctctggaagtccccggtttcacccgcagacaaacttctacactcgaaggataaagttcatcgtcaagttcgaccattatcttttcaggaagttcaatggctacataccgatcactgtagttaggccagaagtcattgtaacgcaccttcttcgaaactccccctatcttgtacactttcgtagaatcatccacatcgaccatttctttacccaacagcgtacgatcgcctttataatctttgggcaagaaattttcaccaacaacgacattgccattccttaaagcttgcaccaacggctgataaccacgcccatcagcactttgataacgaaagacctgaaaaaagtcaggggttaccgaacgccgtagcggattactaactaatgtatcgatacgtaacatactaccggagttactcccgatatagggacgcgcattattggatattgaaacggcctccacttccggcaatctccggagacgattggtcaactcgataatatcttgtcctaaagatgtactcttttgctctttcgaaagataggaattactcttgtcgtttttcaggcttagttccaaataatacgtatcggtaatatcaaatcctaccggttcgtaataagtacgcgctgtcacatacgtccagtcgaccacataccacaggaccacaaaaacaattaatagttctgaccacaaccatccgtttgaccggcgctcgttccatatttgttttaatagttgcattttctttagaatttagatgagttgaagaattatctttcgttgatggcatccacaatattggtgcgagttactctccatgccggaatggcggcacttagcaaattgagtaggaagcaagccagaaatgccagcaggaatacggtaggatcgaacagtaagtcaacacacatggtccgcaaatcctccacaccattggatacaaagtctacggagaaaagcattcctcccaaaaggaaagcggcgacataacttaatacaagtccgagaattcctccgaacagggaataaagcatgttttcggatagtacctgcatcataagctcccgtctgggggcaccaaaggcttttcgcactcctatttcggagatacgcttacgcatgcgtgacaaagtaagtccggacaagttgacggcaggaacaatcaataagacaagtaatgtcagtatgtattgccgtactgcttctttcacagcaggaagattgttggcggaatagcgttgcgcggctacgaaataagtatcaggctgtccgcgatagagtaaatcgaaattgggatgccctgccataaagatagcccgcaagcggtcagcctcctgacgaatagccggaaaatcgtcttttgatttagccagtatatagacggcagtcatacccatgatattgtcatcgccccaagtggctgtgaaggcacttgttgaactcaaaggaatccaaacttgtgcataggcgtacttcgccagtttagagaccggacgtaccactccgcaaacaatataagccgaatgattcagaaggaatgtctttccaaccacttctgacgttccgaacaaacggcgagccatatcttcggaaatcacagcttttgctgctccggcatcaaaatcggcattatcatacggtttaccggatagaaactcaaattcaaatattttccagaaagcatcgtctgtttgcaacacactacaactttccatctcacctgccggtttagcagccagcattgtttcctgccagatattggttatggaaacaacttcgggaattgtcattgctttgaaacaagcctttgccgtattgtatccgatagggccattgctttgccaattcacgttggacttactttgaagtccggcaaaccggaaaataagcatccggtcacgatgggtttccggtgcaaagggagcaatagtcgcacgtaaagtaatcacaattaccattatcatagcaatagccaaagctgtaccaataatagaaatagaagaaagcagtttattttctcccaacagatggaatgcttgtttaaaatagagttttatcatgatcgttaccagtataaagttcagtatatttcttactcgtctcttagtgcttcggccggttgcactttcattgattgcagagccggatacaacacgccaagaataatcattatcgccatcaagagatatgtcagtaaaatggctatcaggaaacggggtactgtaaatgccatttgtgatatatccaccagttcagtatatccaatattgaatgcaatcaatacggcaggaagagccgacatgcttaacagtaacaaactttccgtaatcaaacgatagaatatgtttttccggttagctcccattgccatgcgtaaagcaacttctccccggcgttgctgggtacggaaccagaaagtgccgatcactcccagaaagatattcaacaacaggaaaaagagaatacagaactaggtacgtaattcattatcattgtctatctcactggctgtccggactttgcttaatggagtgacatcaagtatataaacattccctacctgatagatacggtcggcatcattcataagacgttccacaaagccatcgtctacaccttcgcggacacgcagacttaattcgagataggctacgttttcgactgtttccatttgttcgtcagaaaggtaagtgccgatataggttccggtaaaaggttttccggcaatgttataatgatcgtagcgaacgggctctgttaaagctgcaatacgaaagttggtatcactcatgcgaacttctttacccaaaaggtcttttccgtggaaagtagcatccggataatagtctgcaacatcgacaggaacgattattgtatttttctccagagctttcaccagactttcatgaccggaaccatcgatattccggaaacgaaacaccttataatattcaggagtcgtccaacgatccatcgtacttatccaaaccgtgtcgttatccggaaaacggaaactcgctccactgcacccttcattgtatggaatactgttttgagagatacagacagattcaacttccggatgacgggacaaacgtccggctatttcccttaaagcagtcatatcatccttaacagtcagctccggattgaaatcggtagatttatcggtaagacggttcatacgtaatacatacgtattttctatattaaagcccattggctgataatagatatgcaaagtgacataaaccaaatcaacgatataccacaatacgacaaacaccaacaatagctcaatccatagaaaagcattgctccggcgctcattatatatttgtttcaataactgtttcatcatttcatctttggtttattgcatctacaatgttcattctcgacactctccaagccggaattccggcactcaatagatttaataacaggcagaaacagaatgcaacgagaaacgtcaacggactgaacagcatatcagtggaaagagaagtttccccggcaagacctgcattctcactgttatcaaaaaggaatgagtttaacaggaaagtagctgaatagctcaatatcagtcccagtactcccgcaagcagtgtcaatatcagattctcccagaatacctgtcggaacaattcgttggcagtagcaccgaatgctttccggacaccgatttccgtcatacgcttccgcatgcgggataaagtcatactacttaggttgatagctggaaccaagaggagaatcacaatgataagaatgaatcgcctgacaatgtgtttcatatccaagtctgtcccccaatggcggtaaaggtaggcaaattgagtatccggctgaccacgataaatcaattccatatccttcagcttactattgtagacctgacgatatttttcgacttcagcacgaatagccggaaaatcgtcggacgaacgtgcaaggatgaccgcccgcataggtcccatcagattttctctccacgagaaagaagccaaatctgttgatgtatagggaatccagacctgtgcataagaagctgtcgccaactttgatacgtctttcactactcctgtaatggtataatccgctttatttaattggatggtacgccctaccacgtcagttgtaccgaacaggtggcgtgccacactggcagaaaccactgccttggacagcccactctcaaaatcggctttcgtatatggtttgccacacaagaattcaaagcaaaagacttgccagaacgcttcatccgtttccatttcatctacactcatcctgcctcctccgggaagagaagcacgcatcttattattaacggaagtaatggtaaccgcttcaggtattgtcaacgtcttaaagcattcacgggcagtcgtgacggacatctggctgctggcagcattattgtgttgctctttatgccgggacgtcattgccttgacatacaatgatcgtgaacggttaacttccggcacgcagtcttttatccgtatctgcaatgtcagcacgatcaccattatcatgcaaatagccaaagctgtacctaccatacagacaatactaataagccggttctctttcaactggtaaagagcttgctttatgtattgcttccacatcttcttattctttttttgatttgattctacaggagttcacagaagaatgttctacattagaaattccaacctttctttgttacgtctttacacttcaggtttttggagttgattttaccaacgccatcccgcttaaagaaagctgcatccgctttaccggatacagtgatatttcctactccatccactttagctttgatagtgctgcaatcaacattcaacttcatattgcctactccgtcaacatctagtttcaactcatcgcaatatagacttttcacgttacagttgcctactccatcaagttcgaaagctatatttttaagttttagttcttcttttgcatcgaagttccctactccatcaattttcactttactcaaatcgggagcagtaatatagcaaataaggttcttgatattcctcgcattcctatctttatacgagataaccaaagttccgtttttcactgtcacccttgttttttctacaaattcagaaggaccttccaaacggcaggagcatcctgccgattgagtaaaaataatattcccgacagattgcaggtttatggcagaaaactcgtctacattataatctttactcacattttgtgccgatagcgaacagaaagcaacacttaacaggacagctatcgcaacgatgaaaatattctttgtcatgatgatttttaatttagagatacattaatcaatttttccatttagttctaatcgtaagaggccgtttctattgtacctggcgtccatcgaagaaacgaatagtgcgcgaagtctgcttcgcctgttcttcattatgggtaaccatcacgatagtacgtccgtcttccttattcaaccgatgaagcagttccattacttcagctcccatctttgaatccaggttaccggtcggctcatcggcaaggattatttcgggattaccaataatcgcacgggcaatagctacacgttggcactgcccaccggaaagttgtgtaggaaaatgtctcatacgatggcttaatcctactttttccaatacctcttgtgccaaccgttttcgttcactaccagccatacgtcgataaagcaaggggagttctacattatccatcacattcaacgaattaatcaaatgaaaagactgaaatacaaaaccgagcgttttattacgaaaaaccgccagttccttgtctttcattccttcggtacgtattccgttgatttccaccattcccattgtaggtgcatcaagcaatcccattatgttcagcagggtggattttccgcatccggaaggtcccattatacttagaaattctccacgttctaccgtcagattcacattctccaatgctaccgtctcaatctcgtccgtacgataaatcttagaaagagagttcaatgttatcataacttctagtatttagtttatttaattttcaacttattcttgttcttataagcactcatatcgcttactactactttatcacccagctgcaatccgctcaacacttctacatattcaaaattagaatcacctaactgtattttacgttttaccagttcattatcagagttgcagacaaaaagttcatattcaccgcgtcccacatagaaagagccattggctacgcgcattacatcttctttcacagcattcatcacataaacatctgtctttagtccggaacgtaagcggcggtgattatcttctttcaactgaacggtaaatgatatcacaccattcttggatagtggtgtaacactgctaactgtaccttccagtttgtcactccctatcttaacaattgcttttcctccggctgctacacggtcaccgtacgtatccgcaatctcaccttccactttaaaatggctcaaatcagaaatgatagccacctgtccgccttcggaaatctgtgcaccgatctggttattaatataggtaagaatagctttacgcggggaacggatttgtgcatcatccaacgtacgtttcttttcagaaaggctcttgcggaagatattaaaatcaagctcctgaactttcaattcggcagcagctacttccttctcatttttatattgttgctgaagttgttcgtactctaattgagccacattatagctcaattcagcctggcgtaccttatccgttgttcctgcaccgagactgtccagatagtgttcatttctcaactccactttcatacgactcaatttcattgccgaaactttaatctgcattgccatatcggaaagtttcgtctgattattgacgcgaagctgatcaagcttatactggcgcatttgttcctcgtccagtaacttcttatattcaatttccgtactctgaaggtccagtttcagaatcggagtacctacgtctacgctatctcccccttttttatagacttcaataatacgactgttgatcggagaattgataatttcttcaaaagcagggacaaccttaccggaagcactgacacttacctcaatcacccctttatcgactgtggaaaagacaagatcctttgcctccactcctgcccttaatacagatataagtacaccgatgacaataatacttgccactccaatggatgaataacgaattatcttcttattacgttctttttgacgtacctctttaggaatttctctgtccatatccgatcatttactattttatgatgtatcaattcggtactttatataccaaatctgtgccaaaatcgtaaatggttgataaatagaagataacaaaaaacaaagggtgtccgatatcggacaccctgtacgaatttaccgttcagaatagcatctatcatcctgtcgacaggaagcctgtctacttggatgatgatgtaattgaggggttcttttcctcttgtaccagttctttcccccaatgggtagtttcctccaccttttcacgatcacgaatctcttttgctttacgggcatagacaatcatacgcatagactgatcgtaagtgaaataattccatacccaattcaagagtacaataaccttattgcgtactccaaggatagaacgcagatgaacaacgagccacatcacccaggcaaaccatccctgcatctttactttactaaactctgctacggcacgattgcgcccgacagtcgccatcgaacctaaattgcggtaatggaaaggtttcatttcctgtcctttctccatacgaatcagattctttgccaatagttctccttgctggatcgccacttgtgccagttgaggatgcccgttcgggtaattttcatcagctaactgaatacattggtcgccaatagcaaacacattattcatcccttctacacggttaaatgaatcgactttaatacgtcctccacgcccaatcagagaggcatccagatttccgatagtcacaccggtgacaccactcacccagataaaagtacgcgtggcaatctctgtaccatcttcgagtactactttatggtcacgataatccacaacgcgtttattcaacaggatatttactcccatttcacggagaaactgttcagcatgtgcagatgattcttccgacattccggcaagcaatcgcggcccggcttcaatcaaatagatgtgcatcagactgctggacatatcaggataatcattcggcaagacaaatttcttcatctcggaaagtattccggctacttctatcccggtagctccacctcccacaattacaatattcaataactcttgttgttcctgcttcgttgaacaggtcagcgctcgttccagattagccagaagagcgtttcgcaatcccatcgcttctgacacatttttcatcggcatggcttcctcttcgatatgtttattaccgaaatagttggttgtagtacctgctgctaacaccagatagtcatattctgcttttccgatggaagtctgtatcatattcttttccgggaaaatggcacgtacttccgccatacggaaaaagaaatctttccgatgctggaatattttacggaaggggaaggatatggaagttggctccataccagccgaagccacctgataaatcaaaggaggaaactgatgatagttgtttttatctatcaatacgacttgaaagcctgactttttcagcttgttagccagtttcaagccaccgaaaccaccgcctactatgacgacacgtttcttattactttttgcaatgtttagactcatattctaatcatgttttatcaagataataacacatgaatgagtcattaagtttccgaaattcgaaacttttgagagaagtctctaccgcagacgcaatctatctccgatttccggaacatactcaccatccttacgattcatcttatacagatttttgaggcggataccatatttttgagagatgccatgcatggaatctccatctttcacaacatatacagtataaggtttggaagcctttttcttcttgctcttcaggtagatgatatctccttccatcaaggtataatcacgctgcaagtcgttgtacttcacaagtttcctccaactaatatcgaattccttgcctaaatctttaaaggtatcaccgttgcgggctaccacataagcaatatcattagcgatatacacctgatgcgggctcatcaaccaaggattctttttcagtttccgttccgaatatacccccttacggtcgtatttatacaagtcataatcttcgataattgtaatcagacgattagcataagaaggatcggtagcatagcctgcttttttcagtccacgcgcccagcctttataatcggtgatgtccagtttaaaaagaaaagcgtaacgggcacctcttctaaggaagtcggaatgatcttcgtaagagtcacgcggatgcttataagcacggaaacattcgttacgggcatcatcatcatgacgaaccgtacgtccccgccaactgccaccacacttaataccaaagtggttattactctttcgtgccaactggctgtatccggcaccgctttccagcaatccttgtgccaatgtaatactcgccggaatcttatgaagcttcatctgttcaacagccaaatcactatacttatttatatactcgacgtaacgggcattccgtttctgtgcctgcactcctacggcaaagaaaaaaacaacggttaaaaagataagtctatgcagtttattctccattttttattcagatgtgaattagatggcacaaaaatctgaaaaataattgggattatcaatctctttcctaactttgtaacattaattgtagaaaccaataccctgacgtatatgaaagacctcacaattaccgctattattaaagtatatcaatatgatgagttgaatgagggcgatcggtcacttataaagactgccatggaggcaacagctcgtagttattctccgtactcccatttctccgtaggtgccgctgcgctattgggcaacgggacagtagtgacaggaaccaatcaggaaaatgcggcctatccgtcggggctttgtgcagaacgtactaccctattctatgccaactcccaatatcccgaccaaccggttgtcactcttgccattgcggcacgaacggaaaaggacttcatcgaccatccgattcctccctgcggtgcttgccggcaagtgattctggaaacggaaaagcgttacaaacaacccatccgcatcctattatatggcaaagaatgtatctacgaagtaaaaagtataggcgatctactgccgttatcatttgacgcatcagcaatggaggattaattatgttacaacaatatcacacgaaactaaaaggaacactcgcacttacagactcttatctgacagaaaaagcactgcaaaaagaaaaagggctttataaatttatatgggtacgcaacggaagcatcacagtagaaatcgaccatcaggaaatgatacttacccaagatgaagtgatttcactcactcatctgcaacacctcgaatttaaatcgattgatggtgaatacctgactttgttgttcaacagcaatttctattgtatctatggcaacgaccatgaagtgtcatgcagcggtttcctgttcaacggttcttctcacctgatccgttttaccctgaatgaaaaagaacgtaaagaactcgacaccattaccgaagcactggaaaacgagtttaccgtttccgacagcctgcaggaggagatgctacgcatcctgctaaaacgtttcattatccaatgtacccgaattgcacgtcaccgcatgaatatcacccgtgaaaaagaatccggttttgagattgtccgccaatactataacttggtcgacgagcattaccggacgaagaaacaggtgcaggactatgccgatatgttgcataaatctcccaagacactatcgaacatcttttctacctgcaaactgccttcgccgcttcgggttatccacgaacgggtggaagcggaagctaaacgtctcctgctttacagcaacaaaagcgccaaagagattgccgatattctgggatttgaagaccaggcttctttcagccgtttcttcaaaaatatgactggacagagcgccgtgcaattcagaaacacacaggaagggaaaaattgacaaggcatacggaagtattgctattttgggggtagtggaaatggacgacctttgcaacataagataaacccattaaaaccccaacaaaatgaaagagaaattgatcgctttactgaccttcacttcaagtctgaaaagttttggtatgaaatttatccgcgttgccatcctggtagtatttgtatggataggcggattgaagtatttccattatgaagccgacgggattgttccgtttgttgccagcagtccttttatgagtttcttctatgctaaaggtgcacccgaatacaaagaacataaaaatgcggaaggtgcttttgtcccggaaaatcgtgcatggcacgaagcaaaccgcacttatactttctcttacggactgggagctcttattatggggatcggcatactggtattcttgggaatctttttcccaaaagtgggattggcaggcgacaccctcgccattatcatgacgctcggcacactttcttttcttgtcaccaccccggaagtctgggttcccgacttgggaagcggagaattcggtttcccattactatccggtgcagggcggttggtgattaaagacattgtgatcctggccagtgccgtagtgttattatccgactcgtcacaacgcgtactcaaaacacttaaaaaagactaagacaaccactaaagaggattctgacttcttgccattgcggaacaaatcgtattttcagactgttatatagtctcatacaaatcattaatacaagaagttatgaaacaatatgatgcaattattataggattcggcaaggcagggaaaaccctggctgccgaactttccaaccgcggatggcaagtggccatcgtagaacgttccaacatgatgtatggaggaagctgtccgaatgtagcctgtatcccaacaaagacgctggtgcatgaagccgaggtttccgctttgctttaccacgatgattttccgaagcaggcgaatatgtacaaacaggccatcggccgaaagaaccgcctcacttcctttcttaggaatgataattacgaaagactaagcaaacgtcctaatgtgactatctatactggaacggggtctttcatatccgccgataccataaaagtggaacttcccgaaggagaaatcgaactgaaaggaaaagagatatttatcaacacggggtctactcccattatccctgcaatagatggtattcagcaaagtcagcacgtatataccagtagtgcgcttttggacttaagtgtacttcctcatcacctgattatcataggtggaggatatatcggactggagttcgcttctatgtatgccggtttcggcagtaaagtgacgatactcgaaggaggaaacaaatttatgcctcgcgaagatcgggatattgcaaacagcgtcaaagaagtgatggagaagaaaggtattgaaatccatctgaacgctcgtgcacagtctatccatgacacgaatgacggagtgacactgacttactcggacatatccgacggtactccttattatgtagatggagatgccattcttatcgcaacgggacgtaaaccgatgattgaaggattgaatctgcaagcagcgggtgtaggagttgatgctcacggagctatcatcgtaaacgatcagttacgcactactgttcctcatatatgggcaatgggagatgtgaaaggcggatcgcaatttacttatgtctcgctagatgatttccggattatccgtgaccagctcttcggtgacaagaaacgtgatatcggagaccgtgatcctgtgcaatatgcagtgtttattgatccgccattggcacatatcggaatcagtgaagaagaagctctgaaaagaggatattcatttaaggtttcccggttgccggcttcctctatcgttcgtacccgcacattaaggcagactgatggtatgctaaaagctatcatcaataatcataacgggaagattatgggctgtactctattctgtgccgatgcttcagaaatcatcaatatcgtagctatggcgataaaaacagggcaaacctctacattcttgcgcgattttatcttcacgcatcccagtatgagtgagggattaaatcaactgtttgatgtataagaataagaaagaatataactcacttctaaaacagagcctctgaatagggtaaacagaggctctatttggagtaatcggaggctctgaatgaggtaaacggagcctctaaataaatgaaactcattctttttcagtcttaatagagtgaaatctaatagaaagtgttatctttgcaaccaagttaaactatatacctaccgcaatgagaattagtaagtaagacaacacttctaagtaaacatcacttttcttatatgctttttctatttcgttaagcatcacgaaatccgtgttgtttagccagtattgtgtttgtcgttcccccctatcctgtgattttccctcactctattttcaacctcaaacccaatagatcattatgtctataagtattcagcaaatcagctatatccatccggataaagaagtattattcagtgatctcaatttcgccatcagtaaggggcagaaactgggattagtcggtaacaatgggtgcggtaaatctactttgctgcaaattattgccggacaactttcaccctcttccggtgtcattgtccgtctggacgacctatattatatcccgcaacatttcgggcaatatgattcattgactatcgctcaagcactccagatagaacgtaagcaacaagccttacatgctatcctgtcaggagatgcctcaaacgaaaatttcgtcatcctggatgatgactggaatattgaagaacgttccattgccgctctcgatttatgggggctaggacagtttactctatcctacccgatgaatttgcttagcggcggtgaaaagacccgtgtatttctggcagggatggacattcatcacccatctgtcgtacttatggatgaaccgaccaatcatctcgattcttccggcagacaacgtttatatgactgggtagagaaatatcgttccaccctgttggtggtaagtcatgaccgtaccctgctcaatcttctccccgagatttgcgaactggagaagcatcaaatcaattattatggcggaaattacgaattctacaaagaacaaaaaacgctgatgcaggaagcattgcaacaacgtattgaagaaaaagaaaaggcactacgtattgcccgtaaagtggctcgcgaaacggccgaacgcagggacaaacagaatgtacgcggcgaaaagagtaatataagaaaaggagttccacgcattgtattgaacgcactccaagggaaatccgagaagagcactagtaaactgactggcgttcatcaggaaaaagccgagaagttaacaaatgaacgcaaccagcttcgaggttcgctctctccgactgcggcattaaaaaccgacttcaacagttcctcgcttcataccgggaagatattagtgacagcaaaagagattaacttcagttatcattccaattcggttaacaatgatattctgacgaataatgaaataaattcgtctgacacaggttatcttcccaatccgaatagcaatgatattcaggaaaatagtatctcaaaacaacagctttggcaagctcctgtcagttttcagctaaagagcggagaccgcctccgtatagaaggagccaacggtagcgggaaaacaactctattgaaattaatcaccggccaacttcaaccacaggaaggaaccctgacacggacggactttagctatgtctatttgaatcaagagtattcgatcattgacgaccggaacagtattcttgaacaggcttacgctttcaacagccggaatctgccggagcatgaaataaagattattctacaccgttacttgtttcctgcatccgaatgggacaaatcctgccggaaacttagtggtggtgagaaaatgcgtctcgctttctgctgtctgatgattagtaacaatacccctgatatgtttatcctggatgaacctaccaacaatttggacatacaaagtattgaaattatcactgctactatcaaaaattatgcaggtactgtgatagcaatctcacacgacaattattttattcaggaaattggtgtcgaacaatgcattttattgagttagtctattgatattttatccagggcaaccgcaccaatatttaattcatattcgcacagttttgaataaaataatggagtattctggaaacgttgtggtaaatctgaaaaagatgattgagtttttaagattccccgttatctttttattataagatatgggtccagggtgaggggtggtgagggtagatttataaccttttattattttattttctatactatctccttttttatcctcaaaaaaaaaatacgaaagttataaatctaccctcaccacccctcaccctggacccattcattagcgcaacgtttaactcgtttctgcacagttatgaatcaaattttggtgcggttgcactgtattttatctgataagtctaaatatcaatctagtttttttataacttcgcagcgcgaagatcaagaattagaattaaaatgaatcagacagcacaatcatggtggtttatcttttacaaagaccaactgcttcttgagaaaaaagaggatggtatatataccgtcccgtgtggagaaagctctcctattgttattaaagaaaaaacaaccgtacacaatatcaccacactagaaaggaaaaactgcaaggctttctccctctcctctcccattgaagaatcggagcaatggatcatgatagggcttcgtgcctcctatgaatatcttcctttgtctcattatcagacagcaggaaaagcacatgagattctgcattgggatagaaacagccgcttttgttccgcctgcggcacgcctatggaacagaaagaatctatcatgaagcgttgtccgaaatgtggccgggaggtatatccttccatttccacagcgattcttgtattagtgagaaaaaaagattcactacttttagtgcacgcccgcaattttaaaggaacattcaacagactcattgccggatttctggaaaccggagaaacgctagaagaatgtgtagcacgtgaagtgaaagaagaaaccggactggatgtaaaaaatatcacttatttcggtaatcagccctggccttatcccagcggactaatggtcggctttattgccgattatgccggaggggagatcaacctccaagatgaagaattgagttcgggagacttttatacaagagacaatttacccgaacttcccagaaaacttagtcttgcccgaaagatgattgattggtggatagagcatccaaatgaataaatcaaacatggaaaatatcatcaaaggaatccgacagtattatccggtatccgacagttctttggaagtactcttcagttatatgaagaaaatggagcttcctaaaaaacatttactaatacacggtggagtactagaccgccacgtctactttattgaaaaaggattttgtagatcctattgtttacgtgacggagaagaaatcacgatctggttttcacgcgaaggtgatattacctttgccatgaaagatttatatcataatcaaccgggatacgaatatgtagaattactggaagattgtgaattatatgccatacgtattgaagatttaaatcaaatttatgaaactaatatagaaattgccaactggggacgtgtcattcatcaggaatgtttgttgtacatggatattcaccatatcaaccgattgtatcttccggctaaagaacgttatgaacaacttttacgtgagcaacccgatgtcattcaccgtgcccaattgggatatatagcctcctttctaggcatgactccccaacatcttagccgcctacgctccgaatcttgaatctttttaatctatgtgaatttttatatcacaagaaaacagtacttttgacagcgaatacaaaaaaactgataagtatcgtgattaacacattaacttctttacgaatattatttgccttgatggtattcggggcacattgttatgttctggatccaagcttcgacactcacttctttaaagaaggatttgttggagtcagcttttttttcatccttagtggcttcattattgcctataattatgaagaaaagttattggaaaagatcaccaccaaacgtactttttgggtagcacgcattgcccgcatttaccccctccatctacttactctattaattgccgcatgtataggagggtatgttcaatacaacgatacgacagactggataaaacacttcgccgcttccacttttttattgcaaccgttcttcccttctgcagattattttttctcattcaatagtccttcgtggagtttgggctgcgaacagttattttatttctgtttccccctcatcattcctttcttaaatagtaaacggaatctatgtatcactcttttcatctgcctgctggttatgctgacaggtatgcatctgactgctgaagaacaaattaaagcatactggtatgtaaatccaatcacccgcctgccggacttttttgtaggtgttttactttatcagttttatcggtcgatattcaacaaaaagacttcttattccaccggaacactattagaaataggagtagtcattttattttttgttttctatttttgtgccgcaaacattcccaaagtataccgctattcttgttactactggctacccgtttctttggtgatacttatctttgccttacaaagagggtatatatcccggttactatccaatcgggtcttagtgataggaggagaaatcagttatagtttctatctgatacatttatttattatactcacatacctccaaatggctactctgtatcaatggcacatacattggatgataagtgtccccgtcattttttgcatcactattgcacttagcttactttcttattattattttgaaaagcctgccaatagatgggtaaaacgaatactaactaaaaaacaatcataaattagccccatgaaattatcaacaaaaacaccccgaattgaagtagtagatgctcttagaggatttgctgtaatggccatccttctggttcataacctggagcatttcattttccccgtatatccggaaagttctcctgaatggcttaccattttggatgccggagtatttaatgcgacattttcactgcttgccggaaagtcttatgccatattcgctctgcttttcggattcactttctatatccagtcgcacaaccagcagttgaaaggaaaagattttggttaccgctttttatggagaatgatattgctggcaggattcgccactttgaatgctgctttcttcccggcaggagatgtcctgcttctgtttgttgtagtcagtcttgtactgtttatcgtacgtaaatggagtgacaaagcgattctaatcaccgccatcttgttttcactgcaaccgattgaatggtttcattatataatgagccttttcaatcctgcctataccctacccgatttgaatgttggagccatgtatgctgaagtagcggaatacaccaaagccggaaacttttgggattttctgataggtaatattactttaggacagaaagcaagcctgttttgggctatcggtgccggacgtttcttgcagactgccggacttttcctgtttggcttatatatcggacgcaaagaattgttcgtaactaccgaatctcatttgaagttctggatgaaagcacttattattgcagctatcagtttcgcgccactgtattctctgaaagaacagatcatgcaaagtgacagcagtctgattcagcaaacagtaggtactgcttttgatatgtggcagaagtttgcattcacgattgtacttgtttcttctttcatgttgctttatcagaaagataaattcaagaaagccgtatccaacctacgattctacggaaaaatgagtttgaccaactatatttcccaatctattttaggagctattatctattttccattcgggctttatcttgctccttactgtggatatactcttagcttgattataggtatcgttcttttcctgttacaggttaagttctgcaaatggtggctatctaaccataaacaaggaccattggagacaatatggcataaatggacttggatcggaaccaagaaatgacaggaagaaaagcaggctacgaaatatgcacaactacaaacgaacaacttacgaatatgaaactgaacgtatcactctaaagcatcaacaacacatgtgtatatccgcagcctgcctgttgaaattgagatgatgccaatacaacaagattctcgcaagaaggatttgcaagtggacttaaagaatgcaaaggaaatgaaagaactgtaccaagtgaggaaaaatacccgaaaataggcagaatcagggccatgtacagagaaaaaagaagcgcctccacaatcttcaaaagattatagaggcgctattttattatttatctttttatgatctatatctgaaatttcagaagagaccaaatcagatacccaatgattttttcactgcttcaatcttttccatggcggcagattcggcagaagcataacagttgcggcatcccatttcaccctgaacttccatatagaacttaatcttcggttctgtacctgaaggacgaacagaaactttgctaccgtcttctgtgaaatattgaagaacgttagatggttccggcatatcgatggcagttacgttacctttatcatcagtctgtttcagtgtcttataatctttgcttaagatcaccttagagccacccaattctttcggaggattagcacggaagttttccatcattgctttgatttcttcagcaccactcttacccggtttcactacgtttacggtaaactctttagagaatccatattctacgtagatatcaagcaacaactgatacaaagatttgccattatcttttgcccatgcggcaacttcagcaatcagacagcaagcagatacagcatctttatcacgaacaaaatcttcggcaaggaatccatagctttcttcaccaccaccgatatatttctgtttaccttcacgcagacggatttcacgggcaatccatttaaatccagtatagcagtcaagcatttcgatattattcttatctgcgattttcttgataagttcggtagtaacgattgtcttcacacagaactcattacctttaatcttacccagttgtttgtattgagtcagaatataataaaggtacatcatacaggtctggttaccgttaatcagtacccattcacccttgtcatccttacaagcgatacccacacggtcagcatccggatcggaagccattacgagttcagcatcaatttctttagcaaggtttacagccatagaaagagcttccgcattttcaggattcggagatacgacagtcgggaagttaccgtccttaaccatttgttcgggaacagtgaatacgttttcgaatccccacatcttcaatgcacgcggaatcaacatcatacctgtaccgtgaatcggagtatagacaatcttcatatctttgtgacgggcgatagctgccggatcaatagaaacggttttcaccatgtccagataaattttatcaatgtcttcgccgataatctgaatcaaatcaggatttccctggaatttaatgtcagcagcagaagcaatggcatttacttcgtcgatgatgcctttatcgtgtggagccaatacctgtgcaccatcgtcccaatatgccttgtaaccgttgtattccttcggattgtgagaagcagtcagaatgataccgctctggcaaccgaggtgacggatagcaaaagacatttccggagtcggacgcatatcgtcaaacagatatactttaatgccattggcagagaatatattagcagatgtctctgcaaacaaacggctgttgttacggcagtcatgaccgactactacagaaatttgtggcaggtctttgaagttcttcttcagatagttggaaagcccttgagtggcagcacctaccgtatagatattcatacgattgctacctactcccatgataccacgcaaaccaccagtaccaaattcaaggtctttgtagaaagcttcaataagttcggttttatcatcgttttccaacattcgtttcacttcagcctgggtttcagcatcataagccggggttagccatttttcggctttttcagtgacctgtttaataagttcctgattttccatttcgattgttatttattggttaatgaattatttattatcaatttctcgagcacacaaatgtaaaataataagtttataaatcctaggtattcaattaaaaattagaaattaaaaattaaaaaccagagattaaaagtaaatagccatcccacagcaacaacttgtcagcccattttaatctttcatttttaatctttcattttcaattcttattttaccaaatatctgtcgccagtctgtttgacatattcctgcaagaattctttcggatatccgggacggatcacaccggcaggttgtccgatagaattacgttcaaacttaccatctttaacacgcttcactactccatcattatacttcacaatcaagaatgtacctaattgtttccaagtatcgaaagtgctctgtgcggtcatatttgtataatttgtcagaaaatcaactgctgcgttcttatctttagccaacagtttggcagccatctcttcaatgccttcctgtgcattgttgaaagtcgtttccatttctttctgcgcttcccgtacatcaccgatcatcaaatcataacgcggatagaccatattagatacccagttgaaaatccagaaagctgaattccaagagaatgttatataatcggctccatctacacgggtatagcataccggaactttcgttgcgcagcaatagaccggagtaaataccgtcatgttggcatcatccacaccaaaccaaagtacaccacctatcgggtccggcttatgagcacgcatttgtgcaacaaatacaaatccgctttgttgagtggaaatgggacgttcgttgaaatattccttatcgtctaccttgaagttcagaggagaaaggcgatatggcgtcttataaggacctgctccgaaatcattggaaatatcaagaggcgtaccttcatagtggtcacgcatcatatctttcacatcctgtacagacagtttatgtttcggtttcacaaaaagaggcattggagtatcggtctttccctcaatataaggaagatactcttttccattatccgtgaacttattaaaatagctccacacacgtgcctcacagaaacgacgagcaccaaaatcaagaggcgcataagctaacgaaaagctaaaatctttatttactccattaaaatatcccttctcacgagcgaaagaaacgacatccggagagtacatacagttctccttgtcattcatatcaaactggtggatacgtgactgattagcatgagccgaaatgcagtcatcaggcacacgtacagctacccaaacagctccacgaattccgggacctttaccaatcatttccatgatccatatttcgttcggatcggcaatagtaaaggactctccttcgctataataaccgtattgctgcactaaatcggtcatgattttaattgcttcacgggcagtgcgcgaacgttgcaaaccaatataaatcagacttccgtaatcaataatccctgtggaatccgccagttccggacgtccgccgaaagtcgtctcaccaatcgtaacctgatattcattcatattaccgactacattgtaagtctgacgtgcctgctctatttctcccagatacttgccggtatcccattcatacactttcaacatcgttcccttcgggtaggtagcagccggataatgatagagttctccgaacaggccatacgagtcagcagaataggaaacgatcgtcgagccatcggcagacgcattctttccaacaatcaggttagtgcaagcgaaagtgttcgccacagctgccataaacatggcagcacaaagaataattcttcttttcataaatatatgattcacttttagtaatttaccaaacaaagctttcacgagctatcgtttcattcccacaaccatcggtcactgtaaactcgacagtatgctttccgcccttcttcacgtgtttcggatcaagtacacattcccagtacgatttcacaatattggggcgtccgaaaagtgcatacttaccatcaatcgttccacgataggaagcaattcccgccccctgatctttcaaccgatagacaatctttccgtttcttccccactggttcttattgacaggaataatctccggcggaatggtgtcgatggcaacagtataagttcccagctccctgatagcggctttcatgtatccatcttcatactttccacctacgctgtactttcctcccttcggagtgatacgggctacataatatttggtcgtatcggcaaccggctttctacgcaacccgatacgaagttcacaagctgcatgcaatggaaccgtcttatcattcagttgataagtaaaagcaacggcaccactatccgccttcatctgataattgagggggacatcgtcatacaacattcctttcggaataaccaggctcaatcccggttcttgcaaataattagtcttattccaggtgaaataatatttctctcgatgattcaacgcttcaaccggctgcttccggccccgtacggtaaaacgatagttggaagtgtttccgaaagcatctttcaacgtatataagaactgataatcccgttcctcgtcaatcgtcaccaaaccacgattatcattcgacgctttcagcagacgcaacgtattccccggatcaataaaagatttcatatattgtccatacgtccaagagttaatcatccggttttcttcctgtgagaagcgatctactgtgctacgaaatatttcattcccatctaccgcgagcacaacagaataaactccataatggttacttacgccatccatataatcgtatgccttgatacccatacctatcactccccatgcttccacgggacgttcgctattgggaagaatcgttttattctcctgctttccatccacaactcctttgcccggttgcggaaaaaacatgatgccatccgctttcggagcacgcgtatcttttattttcgattgaaaaaaaggcatagggtcaatataatctcccgattccgtttcaaacacatccagatgaagatgcggaccgaacgaatatccggtgtttccgctccatgcaatctgctgacctccttttaccggatattctcccggttcgggaacaatctccacttcccagttctcttcttcatattgaagtttctccaccctttcggcaatgggagaaacaaaaccactcaagtgacggttgatagttgaataaccattatggtagcagacatcaagtacatatcccgatccattcgtgacacgaatacgtgaaatatagccatcagcgagagcacaaacgggtttaccgatcactccgcctgttttaaaatccagcccgccatggaagtgattggagcggatttcgccaaagtttccactcaatgtaagaggaaagtcaaaaggaggcacaaaggtagcttgctttttctcttgtccataccctccgatgcagcaagctagcatcaaagctgtgatatatcgtctcatcattccattcacttttttactcccgcaaatgtacactattcccactaaactatgaaatatctgggaggaatgatggccttagattctagttaatatttctttttaatgttatattcattgcaaatcagtagtcattatgttattaatattagtacttttgtggctgttttttaattataattaaaagttagagactcaatgagaatgtatgtaaaagtaatggcagcggtcattgcatgtatattgctgagtggagaagcgctctcggcatttgcaactacccccgctacagaaaatctgagttggtttaaaaagaaaaagaagaaaccagaagagaaagaagagaagagtaaaagcgactacgaaaaattagtggaagacagtaaaactacaaaaggaatgtttgctgtacaccaaaagaagaatgactattattttgaaattcctacctcacttttgggacgtgatttattagttgtcaacaaactgcagcgagttcctgccgaacttaatgatgcaggtgtaaaccgtggagtaaactacgagaatcagatggtttgcatggaatgggataaagctacgggcaaactaatgctacgacaacaacgcccattacctctggccccccaaacggatgctatcttccgttcggtaaaggataattttatctctccgttgattgccgcattcaaaatcgaagcgattaatgcagattctactgcattagtaatcaaggtgaatgatatttatgacggtactgaaaccagtattaataatgtatttactaatatcaatctgggtacttcggctatcaagaacttatcacgtattttatccatcaaatccttttcaaacaatgtcgtggcaacttccgagttgaccaccagagttacagaaggaaccaccacagtttatgtgacggtggaagttagctcttctattctcttgttacccgaaaagccgatgatggggcgattcgacaatcagaaggtcggttatttcactaatccgttattaagtttcagtgatgcacaacaacgtacggataaaacacagtatatcactcgctggcgtatggagcctaaaccggaagaccgggaggcttatctgaaaggtcagcttgtggaacctgccaaaccaatcgtattctacattgataattcaacgccttaccaatggcgtacgtacattaagaaaggtattgaggactggcagattgcttttgaaaaggctggtttcaagaatgcgattatcgccaaggaaatcacggacagtatgcatgtagatatggacgatgtcaactactccgtactgacttatgcagcttcagaaaagaaaaatgcaatgggaccttctctgttagatccacgttccggagaaattctggaagctgatattatgtggtggcacaatgtgctttctatggtacgcgaatggatcactgtgcaaactggaactgtgtgtccggaagcacgcaatgtgcaattacccgatgctttaatgggagatgccatccggttcgttgcttgccatgaggtaggccactcattgggactccgtcacaatatgatgggatcatgggctttcccgacggattcattacgttccgaagcattcacttccagaatgaattctaccgcttcatctatcatggattatgcacgattcaattatatcgcacaaccaggagatggcgtgaaagttctttctccgcatatcggtccttatgacatgtttgctatcgaatatggttatcgttggtacggaaagaagactccggaagaagaaaaggatgttttattcgattttttgagcaaacatactgatcgtctttataaatatagtgaagcacaggatgtacgtgatgcggtagatccacgtgcacagaacgaagatttaggtgatgatccggttcgttcttctttacttggcattgagaatctgaaacgtattgttccgcaaattcttcaatggactactaccggcgagaaaggacaaacttatgaagaagcatcacgcctctactatgcagtaatcaaccaatggaacaactatttatatcatgtccttgccaatattggcggtatctacattgaaaatacaattgttggagatggcgtcaagacttatacattcgttgagaaagagaaacaacaagcttcactaaaatttctgatggatgaagtattaacatatcctaaatggctgtttgacacggaagtaggacaatatacttatctacttcgtaatactcccatcggaaaacaggagaatgctcctacgcaaatcttaaagaacgcccaagcctatatcctttgggatttactaggcaacacccgtttgatgcgtatgatagagaatgagtctgtcaacgggaaaaaagccttcacagtagtggagcttatggacggacttcataaaaacattttcggtattaccgaacgtggtggcatccccaacgtaatggaacgttctttgcagaaaaacttcctcgatgcattacttacagcagccgcagaacccgaagctgtaaaaatcaacaagaagattgcaaatgagcatttcctgcttgaccatgccactcctttctgcagctgttatgcagccgaacaacgggcacttcgccaagaagaccgaatgggcgctccacgtgtgcttaacttctatggtagtcagctcaaccgtatttctgatgctatctcggtgaaacgcggagagctattacgtatcaagaaattgttgcagagccgtctcggcacttctgatactgctgcacgctatcattatgaggatatgattctacgtattaatacggctttgggaatcaaataaaacaaaatcaatcactttaacaatctatattgatgagaaaaaaatatttatacgttcttatatgttttcttgttagcacgttggctgtagccaacgctgctaatcgcacaatcaccggagtcgtcatatccggtgaagacaatgaacctctaatcggtgcttctgtatatgttaatgcagacgatttgaaaaaagccggagtatcacagacttctctaggtactatcactgatatggatggtaaattctccatttccattccggaaaaggtgaccagactacattgtagttatataggttttgaagaacaaaacatcatattacaaacaggaaaagatacttatcgtattgtacttcaagcttcatcacacacattaggagacgtagtagtaactggttatcaagaactggaacgtcgtaaactgactgctgccattgccaaagtagatgttacagatggaatggtaggtgctgcaaaaagtatcgatcaggcgttagcaggacaaatcgccggtgtagctgttacgacaacttctggtgcaccgggagctccagcacgtattcgtattcgtggtacggcttcattaaatggaacacaagacccattgtgggtattggatgggatacctttggagggtacggacattccagaaatcaacaaagacaacgataatgacatcgtaaatatgtcacaatcttctatcgcaggtttaagtccaaacgacattgaaagcattacgatattaaaagatgcagctgctactgctatctatggtgcacgtgctgcaaatggcgtaattgtggtaacaaccaaaagaggaaaaaccggaaaacctgttattaacttcaatactaaattgacttatactccaaatctcaatacttcacgactcaacttactaaactcggaagagaaagtcgatttggaacttcaattattaaaagaagcacggtttgacatattatggggattaacagatccgataccggtatttcctgaaaaaggaaaagttgctgctatcatgaaacaatataatttaatagacatctataaagaacaggggtggaacggactgacacctgaagcccaaaatgctataaacaaactgaaaacaatcaatacagactggaatgatatattattcagagatgctttcacgcaagaatataactttagcatttccggtggtagcgaaaaggttacttattacaactcacttggttatgtcaaagaaaacggaaatgtaccaggtgtaagcatgagccgttttaatctgaccagtaaaacgtcttaccaaatcaacaaaatattaaaaattggaatgtctatttttgccaacagacgcaagaataacacatttatgactgatacttacggacttattaaccctatatattattcacgtatcgccaacccttactttgctccgtttgacgaacaaggaaactacctttacgattacgacgtagtcagaagtaatgaaacagatgaaaagcaaggctttaatatattcgaagaacgagcaaacaccaataaagaatctgtcaccacagccatcaattctatctttgatgttcagctacgttttaacgatcagtggaaagtttattcacagattggtgtgcaatgggatcaattgtcgcaagaagaatatgccgggataaattcatataatattaggaatatacgtgaaaccaataaatattggaaaaatggtgtacaaacctatcttataccagaaggaggcatgcttaaaacaactaatagtacaacctcacaactcacatggaaaatccaaggagaatacaaaaacacatttggggatatacatgacatacaaataatggctggttcggaaattcgcaaaaactgggtagacaaccaagcctcaaccggatacggatatgatcccaagaaactaacattccagaatctcatatttaaagatgaagcacaagccaatgattggaatctaaaaactaaatcgtacaaggaaaacgcttttgcttctttctttgccaatggttcatatactttaatgaatcgttatacattgggaggaagtgtgcgcatggatggttctgatttattcggagtagataagaaataccgtttcttaccaatctattcggtaagcggtttgtggcgtttatctaatgaatcgttcattagacaatacaaatggattgataatttagctcttcgcctttcttatggcttacaaggaaatattgataagggaacctctccattcctagtcggaaaatatgataatgtgaatattttaccaggttacagtgaagaaaatattattatcaatagtgctcccaacagtaaattacgctgggaaaaaacagcatcttacaatctaggaatagatttttctgtactcaatcaagccatcaatcttagtgtagattactactatagaaaaggaacagacttaattggttctaaagcattagctttagaaaatggattcactaatatgtctataaactgggctagtatggaaaataaaggtgtagaaataaacctgcagacacgtaatatcaccactaaaaacttctcttggtacactactttcaacttcgcatataatcaaaataaagtactaaaagtacttacagataaaagccaagtgactcctagtctggaaggatatcccgtaggtgcaatctttgcactaaaaacaaaaggtataaatcctgatacaggacaaatctatcttgagaataaagaggggaaagctgtcactgtagaagagttattcagaatgacatcgaatgaagatggtcttggcacttaccaaataggaccaagtactgaagaacaaagagacttttacagctatgttggaacgtcagatgctccctacacaggcggttttctaaatacgttcaattaccgaaattgggaactgaatctgaatttttcatataattttggagcacacgtaaaaacaactccaagttataatgtatctgacttagacccagggcgcaatatgaatagagacatactggatagatggacaccggaaaatacaacaggaaagttccctgcattagcaacgtacaattacaatccggccgactactacttgttcagtactcgaaatgacatttacagatcactggatatctgggtaaaaaagctaagctttgtacgtctacaaaatatacgtcttgcttaccgggttccatccgaatggcttcataaactaagtatcggcggagcaactgtaggattagaggctcgtaacctattcgttatcagctctaattatgataattatatggatccggaatcaatgggcaacctatactctaccccagttcccaaatccattaccttcaatctaagtcttaacttttaaaaaatatattatgacaaagaaaatatattatatattcacattaataggaagcctgttattatcttcctgtgatagttatttggacatacaaccagtaggccaagtaattcccaatacgctagctgaatacagagctttattcacaacagcttacaatacagcactcaatgacagaggaatatgcgaaatcagaacagatatcgcaaccatattacagtctgatgccacttccaaaaattctttaggagatgttgaaaaatggaatgatgttaatccgaatgcaagtacgagacaatttggatgggcggcctattataccaatatctattatgccaacgcaatcatcgataaaaaagatgaaatatcagaaggaagccaagaagatattaatcaattagttggagaagcttacctcatgagagcatatatgcatttcatattggtcaatctttatggacaaccttatacagctaccggagcattagaaaccaaagcagttcctctaaaactcaatactgatttagaagaaataccatcaagaaatactgtaaaggaaatatatacctctattttatctgatatagaaacagcacggaaactgattaataaaaaagaatgggaaattcaatattcataccgtttttcaacattatcagtagatgctatggaatcacgggtatatttatacatgggtgaatggagcaaatcttatgaagcttcggaacgtgtattagccggaaaatcgacattggtaaacctaaatgatgaaggaggcaaacttcctaatgaatttacatctgtagaaatgatcactgcctatgaagtttttccaaatagcgattatgccggatcactcttactttacccttcatttttacaagaatatgaggaagaaaaagatctacgtccaaacaagtattatcaagcaaataaaaatggaaattatacttccatcaaaagtggtgaatctaaattcaaatgtactttccgcaccggagagctttatttaaattcagcagaagctgctgcacatttaaacaaattacctgaagcacgtacccggctcttgaaactaatagagaatcgttatacatcagaaggttatgagcagaaaaagaatgaaataaatgcgatgagccaagaaaagctagtcacagaaattctgaaagaacgtgctcgcgagcttgcttttgaaggccatcgctggtttgatttacgccgaactacccgaccggaaatcaaaaaagaaattgaagatgtaacctacacacttgtacaagatgattcccgttacacattgcgtattccacaagatgcaattgatgctaatcccggacttttaaactaataaccaagcatttttcatagaaacaaaccgcctgacatcatagactaaaaagctccctttaccaaaagcgtaaaaggagctttttttaatctatctattagccatttctcattttgtacacctacctcattcaccattaaatctttatcccctaaaagcattgttctttaacaagaaatccgtatctttgtagcgacttattacgattaataacgtagaagcgtttagaatattatctctattcagaatctggtaaattctttaattggggagataatggcaactaagcgttcacgtctttgttatatgcaagggcgtggactctgttgttcatttcccaataggtttaccagagccttgaatagaatgaactaacgacgtccacgcttctcttgtatatatatggtatccggacgcttaccacacaaacaataaaggtaatgagcagcactattacaaagttcttcgcttcttttttagcttatggggtagctaataagaaaaagcgtttctcggcaattggccgtttctccgaaggattggctccggtaaaaggaaaaatccaatggggatacatcaataaaggatatgacgttgtcattcctctaatgtacgaacgggctttctcttttaaagaaggattagggatggtagtactcaattctcaatacggattcatcgaccataccggacaaatacagattccgtttaaatacacagccgctcactcgtttgaacaagaatgtgcacgggtatgccacgatggattatggggattgattgacagacaaggaaactacattcttccaccgacttacagtcaaatagaacaattcgcggaaggattagctctcgtctcgctacacaataagataggattcattaacaagaaaggagaagttgtcattcccctggaatatgataatggacgctctttctctgaaggattggctgctgtttgtattgaaagtcagtcgcccaagtgggggtatataaacaaagacaatgaagaagtacttccttttaagtacgatattgcagaacccttttataacaacatagctcgagtgggtctctatggaaaaagcatgaaaatcaacaaacagggcagtgaatgtctataaaacaaccactctacgcatttattcatctcaacacgcaaggcattctgttctaaaacatccccttacgaataacaacgtaaggggatttttcgtactttcgaacatgttaaatctttaatacgtaacattatgattatcggagtaccaaaggaaatcaaaaacaatgagaaccgtgtaggcatgacaccttcaggagtggccgaagtggtaaaacaagggcaccgggtgtttatccaacatacagcgggagtaaatagcggttttccggatgaagcatatcaagctgtcggcgcacatgtcctgccaacaatagaagatatttacgccactgctgagatgatagtaaaagtgaaagaaccgatagtcactgaatataacttaataagaaaaggacagttactattcacttatttccattttgcttccgacagggagttaacccttgccatgctctccaacaaatcaatatgcctagcttacgaaactgtagaagaagcagaccacacattacctttattaattccgatgagcgaagttgccggacgcatgtctattcaggaaggtgcccgtttcctggaaaaaccgcaaggcggaaaaggtatccttttgggaggtgtaccaggtgttaaaccagctaaagtattaattttaggaggtggagttgtaggtagcaatgctgcacaaatggctgctggaatgggggcagatgtcactattacagatataaatctggcacgtctgcgctatttgagcgagacactgccgaagaatgtaaagacattgtactcatccgaactaagaatcagaaaagaattgccggatgttgatttagttgtcggctctgtactgattcccggtgataaagcaccacatttgattaccaaagagatgctttcaataatgcagcccggcacagtattagtagatgtagcaatcgatcagggaggatgtttcgagacctctcacccgaccactcacagtgcaccgacctatattgtagacggaatcgttcattatgcagtagctaatattccgggagctgtaccttacacttccacccttgcactaaccaatgctactctcccctatgtgatagctttagcaaataagggatggaaaaaagcctgcaaagagaatccagcattagcactcggattaaatatcgtagaaggaaaaatcatttataaggccgttgccgacgtatttggtttgaagtacgatcctatcagcctgtaactatgcattttcaccatacagtaatataaagtcttacagagttctttctttttttcaaagtaaggctatctcaatgtcttacgtcttcgattgataacctttaaaaaactctgcaagactttgtattactctgtggtgagctatatctttaaaataaataatctttctttgccgcccgttgataagccgctaccaattcgttcattacttctgccacagactgccgacgggatatgattgccgaaacttgtccgatctccaattccccttcttccagatcaccttcgaagattccttttttagcacgcccccgtcctaataaagttctcaaatcttcagcactagctccactatcttcagccttctccaccgcttcgcggaaagcattctttaccaaacgtgtcggagccagctttttcaacaacaacttagtatccccttctctgagactcaagcaataatctttaaataccgaactcgcagaactctcttcagtaagagcaaaacgggttcctatctgcaccccttcggctcccaacaccatagcagccaatactccttcccctgtaccgacacctcctgcagctatcaaaggtaatgttatagcctcacgtacagccggaatcaaacagaaagtcgttgtttcttcgcgtccattatgccctccggcttcaaacccttctgccactaccgcatctactccagcctcctcacattttacagcaaaacgggaagaagaaacaacatgaacaaccgttattccacgctctttcaaccacccagtccacgttttcggatttccggcagaggtaaaaacaatcttcactccctcttccaccacaatattcataatctcttctatctggggatacatcaaaggaatgtttacaccaaaaggcaatttcgtggccgcattacatttacggatatgctcgcgtaaagtgtccggatgcatggaaccggcaccgatcaatcccagtccaccggcattgctcacagcagaagcaagacgccaaccgctgcaccacaccataccaccttgaataataggataccgaatacccagaagagaagtaattctattcataaccaataatttatctatgtgttaatatactaagataccaataatagcgacaaagctatataacaatgcgccaacataacaacacacaaatatactaattattcaattacaaacattctctagtcagcacattagcgcattgctacatcaacacatcattataacgccttcaacgggcaatctgttcaattggtttatttatcaacacagtggtagaatctccataagttctcaacacttccaatgtgcgggcacggttatcccgtcccgtcttattccagaaatcttttgtaaagacagccatcaggtcaagtccgccgatagttccaccattgatatacactccactcccaccaaacaagggaataggtgcatccatcactaccgtgttcaccatcattccgttagcacgttcacccaactgacggaaacgtaccccactcgcctgtatctcatccaacgacttacgcattccctttgccatcggattgcgtgcccagtttgaataagatctttgatggcgtatctcgtagaaaggatcaccccgccaggtatttttatcgatctttatcttcttctgatagatgggatcccagttatagcgggtattcgctttatatggcatcagagtcaacatcactttcggtttaggcaacgcttcaggaagcgattcgtcaggcatcatccagcttttctcctccgacatccggggagtacccactgcgcttccgaaatcaatcgacttcacagcatccatatttaaatgcaactcctggtcactctccagcaatttcttcaaatgcaaagaatcttgcgccgtccatacttgcgaatatgcaaatacagcggtcaggcacagtgccatcgttgttataacccgttttaatccatccattctttttactctttcattacctatatttcggagcacttcatatacatttgtacgtataagaggctatcttttgagcgtaataatccccctgtcagcagcaaaagactactgatacaaacaaatattcccacatgaatgtttcctattttttactttccgaaggctcctccccctttattaccaccaacgataacccgatccacaaagcggttcatcgtagcacggatcgatcgtccatcttgttttcggatattggcgctcttcccaccaactacgataacaagcggctgcatcgagtacttcctcatcggtcaggaaatagattgcttcataattttcagcattcgccaataccattttgcaacctaatgacggaggtgtgccctgacggattgactcaatcacccaaagcatacactcacccaaccgaatcttaccgttgttcatattataaaccgacggaaaagaagggataatagtcagatcttctgcatattttaaaagttcggggatatcctcttccgtgaaatgaggaacctccaccacccctttttcattcttcatcttgtacgtacccgacttcaattgcttcacaaaaagagcaacatccggattgttataatccatttcttcgctggtgcatcctgtaaaggatacgatcaggcaaacagccatccacagcattagtagtgtttttttcattttcataaggattaatacgtcatgcgaagtccgcaaagtaaattaaaattagtcggccgtttcgttcgtaccgtagccaatttcgaatctgtcttgaaatgatgcgaaactccgggttcggcaaaaacagcaagtcggtcattaatcttataattgattccaataccggcagtcactgccagctggataggttcttctttaaaactgttgtccggtgcaccggcaatacatttatcggctattcctcctacagtagcgtaaaggtcgatttttttcgtatctaccaacgtcacgttcactttaacagggattcccagatagtgcaaatgctgccctgcagaacggaggttcgaatagagtaatccggtttctatgccaagaaaatcgttcaacttacgctctaccgtcacccctgcggaaaccggcattttataagtaccgttatctgccggaagtgctgtacccacttgaactttcatcgcccagcgatgctttttcactgctttgggttgagacatatcgacattcgactgttcttccgaagcgacagatgatcctgtattaccgtttgttgcctgccaataaccattatgcccctgattaccatatctgttaccatttcccgtagaagtagtggaagaaaaagaaaacgacatagagaaagtgatagaaagagaatcttcttcctccgtatattgcgacagcataccgtaagatttcggagccggtttcggcaacaccggttctaccggcaacggcaactgattgacgcgtattccatctccatccatctgtcctccattcgtcacggctatctttgtaaatgcttcttccatttcctcctttggagagaaatacaagaaagtagccgacgaggctgccaaaacaagcaatacagatgccgcagccgctacacggaagagcagaatccgacgacgatgctggcaagccacaggaatttcctgcgagagctcttcccaaaagccatcccgtacactcatcccggcatcagcgagacgcgtgcgaaacagatcggttatttcatcattttctttcttcatgatttctatactctttaattctttttgctaacaaatatttggcccggtgcaactgcgaagtagatgaatgctctttaatatgaagcatcttggctatctccttgtgcgatttctcttcaaacacataaaggttgaaaacggttcggcaaccatccggcaattcggcaataaaagccatcaactgctcttcggagattccagtccctcctcccgaatccgatatatccggtatatcgggaagctgctcttcatgcactaccaactggctgactcgcttctcccgtcgcaggaaatcgagtgattgagtaaccatcacccgggtaatccatgtacaaagtgaagactcaccccggaacgaaaagttggtaaaaatcttgatgaaaccgtcatgcagtacatcgtgcgccgcatccatatcgcccgtatagcggaaacataccgccagcatctgcttggaatagagagtgtaaagttcctttcgggctgaatcctttcctgcccgacagccctttatcagttctatctcgttttccaaagtcaattacttttttttaaaatcgaacgtatgtctgcgtcgtttgctcattagacgcgagagtttgaggaatgctgcaaggaatattgctaaaagaagttaaaggatagataattaataaacgggaaagaaaaaacggtgaacgataaacggtaaatgatgaacaaagctgcgcataatcatgctacaaaatatccaccgtttactgtttatcgttcaccgcttacagttcaccgcttattatactatcagcatgctttgaaactcatgtccagtcctttcactgaatgagtcaaagctcctacagagatgaagtctacgccacattcggcatactcacgaagagtatcaaaggtgataccacccgaagattcggtttcgtatttgcctgctaccatctccactgctttcttagtcatttcgggagtgaagttatcaaacatgatacgatccactccgccaaggtcaagaacttgttgcagttcgtcgaagctgcggacttctatttctattttcaggtctttgcctttttccttgcaatattctttagcacgagtgatggctttgtcgatacctccggcaaagtccacatgattgtctttcagaagaatcatgtcgaacagaccaatacgatggtttactccgccaccgattttcactgccattttttcgaggatacgcataccgggagttgttttgcgggtatcaagcacacgggtatttgtaccttccaatacctttgcatatttacgggtcattgttgcaatgccgctcatacgctgcatcacgttcaacatcaggcgttcggtctgaagtaaagattgcacttttccttccactaccattgctacatcacccggtttcacttctgttccgtcattgataaacacttccactttcatggtaggatcaaaacggttgaagatttctttagctacttcgatgccagccaacacaccggcttctttgataagcaattttgattttcccattgccgtagcgggaatacatgaaagggtggtatgatcgccatcacctatatcttctgcaaaagcaagatcgatcaacttgtcgatcagttctttttccttattcattgatcttgtcaattcttatttgatgtattaaatattgattctgcactttcttcaggaagcagttcacacgaaagttcccattagtagtagccaacgtgccgataacgaaacttgattcgtcccgttttccctgatggttcacattaaatccgctgactttattcttcgtaaagaattcctgcatcgcagctgttgctttctgtttgtcaacgtttgtcgagcgaccttggagcaccaggtttaccttgtcccccatatacttacttagctcttgcgagcttcctcttttaaatgccgtaatcactcctgccggtatctcttgcgccattagcaacgagagggaaagaagcaatgcggtcattcctacgagcactcgttttttcataattacaagcttttaagttgaagtttaaaggcttaaactttcaactaatgataggcaaaggtaagcattaattgcagaataacataaaaaatgcctatttttgtgcaataatcagaattgtagacgtatgaaaacaaccctgctcgtcgtaggacgaaccgtagaacagcactatatcactgccatcaacgactatatccagcgcaccaaacgctatatcacttttgatatggaagtgattcccgaactgaaaaacaccaagagtctttcaatggaagtacagaaagaaaaggaaggagaactgatactgaaagcccttcaaccgggtgacgtcgtggtgctgctcgatgaacacggtaaagaaatgcgctctcttgagtttgccgaatatatgaaacggaaaatgaatacggtaaacaaacgattggtgttcattatcggaggtccttatggcttttcagaaaaagtgtatcaggcagcacacgaaaagatttcaatgtcgaagatgactttttctcatcaaatgattcggttgatattcgtggagcagatttatcgggcaatgacgatattgaatggagggccgtatcatcatgaatagtaacttatctcatatactattataaacgagacaaaatagactttttaatttcgtcccaagatacatccacaaacatataaggcattggctcctcctccgcatcttcaaaataagctaaacttttcatagccataaaagaagatgagtcaggatatttctgagaatagaaatccaatagatttttcaatgaatactttttcaacaaaaagtaaatatctacaaaatcttttttagtacctctcccttcaatagcagtaattttcattgccgcaatatctctaggacttgccaaacgtatcccatctttatatacgacatcatcaagccaaggataagtatagttcacgatatctattttaacctcattcaatacgtaaatgtgtatattcttagaatcatttaagacagtcagtgtcccaagtgttcgtaaagcttccttcaaatcttgagaatctacattaatctgaccaaaaaaatccaaatcgaccgactttcgatgtcctaattgcaaactaatgcagtaccaccgactagacgagtattacaaagtacaggtaactgttgcaacttttttaaaagttccagtgttgtggattcgaccgttgataagtgtaacatctaaattgttctttaggagtttgtgaaatggcagaaagataagctaaagcccgaggctccaattcacgaaaccccttagctatttcgacgattctcccaagtccataatattgttttacaatattccaatcttgcaacataccatattcaagcactctctttattatatattgtgaatgcttctccatatccaaatcatctttattgacatcccaaaaaagatatgttgaaaatcgagtaatatattcttccattgtctatcgtattgcaatccttaatatgacaaagataaaaataaaaaatgaatcgaacgcaagctaatagctatatttcacaaaactgtattattctcttcttcatagattttattaaaaactctaaaaagttttttttcatccgcaattagttgacgaagttctgccaaccgtccggcattatccgattggggtatccataacgtcagataccctccttctgcatatttttcagttagatgtttccgaaaacgggcatattgctcttctttatccatctccggataatgagacagcccatattgtacggtacggcgtaaagtaacttcgggatcaataattcggtcagcctcggcaacaatcattccatagattgttctgggagcctgtttattggaagcccgatgatcttctatcgcctctttcatctgcaacagctgttcatccgtaaaccaacgccgcaaagtttcgtcggctaacaatactttgccggaggttatatgatgaaattcacgtccttcatacaaccccaggtcatgataagcagcaatgacataaaccatcgaataatcgacttcataatacgtcgctaatttcagactttcctcaattaccttttctacatggtcaatttgatgcgctttatcaaagttagcgtattgaggaataatactttgccgaacatagttttgcaattcagcaggcacatgatgagtcatattcgatttttttagctagtaaattcttttatttatattattcccgattcatcaaacgatgttctgccatctgttcgaactttgttcccggacgaccataattggcatacggataaatggaaataccaccacgaggagtaaatattcccgttacttctatgtatttgggattcatcaatcggataagatctttcattatgatattcacgcaatcttcatgaaaggctccatgactgcggaaactgaaaaggtagagtttcaaactcttactttctaccatttttatatcaggaatgtagctgatacgtatttcggcaaagtccggctgtccggtaataggacacagacttgtgaactccgggcagttgaaacgtacccagtaatcattttcaggatgcttattatcaaaggcttccagtacttcaggagcataatcttgtttatactcggtttttcttcctaataaggaaagttggtcttttaattctgtcattgcactcattaactacaaactctactctaaacaaaaaaacgcatttcttctttcacctatcaccgtcctgcctcaaacgccttattcatcgaggttttagtggtgaaggattcatttcacaacctatcaccgcatctatcacctatcaccatcaactcttatcctacgtttgctttctcctcacctcacttgttacagtgtgtttcattgcttgaaacaatgtgtttcccgccttgaaacaaagtgtttcattacttggaacaaactgtttcaagtcttggaacttatagtttcaagcgttagaaactttagtttcctaccgttgaaactttagtttctcacctatgaaacaacagtttcaagctattgaaactaatctaagccaatacattccggacagaagctactatcatttattaattagaacttaccggtgacaatagatgtgacggcaaaatgtcaaatttagctgctgtcactacttgctgtcacaaactagaaatcttataatcaaacatttatctacaacaatgtgacagatgacagcaataaaacgcattttaatctctatgtagagatattattgattcttactttttaaatacttttccaatccttcccgacgcaatgtacaagccgggcaatgtccgcaaccatctccctgaacgccattataacaggtcaaagtctcggtgcgaatcagttccaatacccccagttcgtcggccaatgcccatgtttctgccttatcaatccacatcaaaggggtatgaatcacaaattgttcatccatagccagattgagagttacattaagagacttgataaaggcatcacggcaatcgggataaccgctgaaatctgtttgagaaactcccgttaccaaatgattaataccacgttcacgggcatatactgctgcgatacttagaaaaaacagattacgtcccggaacaaaggtattaggaacgctatctgcaggtttttcctgatccatcaccatcgtagtattggtcaatgaattatgacctaactgtccgataaaagaaacatccatcacatcaaattccacttccgctttccgggctatctcccgtgcaagctccacttctttctgatgtttctgaccgtaaagaaaactcaaggcatatactttcttaaagttgcgttttgcccaaaacaaacaagtcgtagagtcctgtccaccactaaacacaaccaatgctgcttctctattcatattctatcttaaatatctttgactttcaatacattataggagatatcggtatcatacacatcgctaccgtctatcttcttaatggctttcactacacgaattgtcaccggaaggatcataacttcatacatggatttcagcacaatctgaatccccatcatgataagcagttctttccaggcaataactccaccaaaagctaccgggaaaaaaatcaatgaatcggcagtctcacctacaacagtcgaccagatggcacgggccgaaaagttacgcccctgactggctactttcatcttactcatcacatacgcattgagaaatgagcctaccagaaaagccatcagactggcagccacaatacggggagccataccgaacacaaaattgaaatgttcctcgccctcccagaaaggagcagccggaatggcaacagctatcaacccaagagcaaccacgaagaagttcatggcaaaaccactccaaatgatgagccgcgctttcttgaatccccaaacctcggcgatacaatcattaataatataagaaataggaaaaactaataatccggctgtcacggtcagactacctacctggattacttttgtttcaaggagattggctgcaatgagacagacattaaacaaaatgcccagcaacataaagggtacagatactttttctttcataattcctgttttttacgtggtgttctagaatacacggccgctattcacggcatcatacattttttattctttcagggtgcaaaggtataggaaaaactatgaaaaagcaaaagaaatccgatgattgacatacatttcaccgaaaagacataactttgccaaatatagagcttaatgtttgtatcaaagattaaacttataaaccatatttaaagaaacgatatctaaatcatggcaaaagaaaataaaagcaatatcatcatctaccagagtgaagacgggcagacacacatagaagtgcagatggacgaagataccgtatggctatcccaacagcaaatgggcgacctttaccagacgtctcgaacaaatgtggtagaacatattaagcacatttatgaagatggtgaacttgttgaagagtcaacctgtcggaaaatccgacaggttcgacaagaaggagcgcgcatggttgaaagagaaattcctcactacaatcttgatatgataatatctttaggctaccgaataaattcaattcaagccacacacttccgtcaatgggcaacggcacgccttaaagaatatatcatcaaaggcttcaccatggacgacgaacgattgaagcagatgggaggaggctattattggaaagagttgctcgaccgcatccgtgacatccgatcgtctgaaaaggtgatgtatagacaagtgcttgatatctatgctactgccgtagattacgatccccgcgccaaacaatctattgaattcttcaagattgttcagaataagctacactttgcagcccacggacatacagctgcagaagttatttatgaacgagccgatgccgaccaacacatgatgggactaacttcctttaaaggcgaccatccgacattgcgcgatgcaaagatagccaagaattacttgagcgcagaagaactcaaagtgctgaataaccttgtctccggatattttgattttgctgaagtacaagctatcaagcaccgtccaatgtacatgaacgattacatcaaacatctggatgccatactgtcttccacgggagaagttctattgatggatgccggtatgataagtcatgaacaagctatggataaagctaaaatagaatatcgcaagtgggaagtgcgcacgctttcacccgtagaacaagcctacctcaacagtatcaaaacactgaatcataaaactaaaaagaaaggatgaataaaaaagaatgaaaactctctaattattaaagaatcctttttcagacgactactgtgaaagaaaaatccatagaagcaacccataccgcacaagaaacgcccaaaaggccaaacacagagtacaggaaaactggattgacagtaaaaaagccttcccatcagcgtcgtattctgacaggtaggctcatcactttgaccttaaaacacatcactcaatcaggcctctgcatcaggaggagaaatctttcaattcctctttcaaccgcttgcggatgaaaaacaaacggctctttaccgttcccatcggcaatcctaatttttcggcaatctctctatacttaaatccggcaacaaacatctggaagggaactttcatttcttccggtatggaatgtatcacccgatacagctgtttcatatcataggtaaattcaaatctgtcggcatcttcatcttcgatcaaatgttgctgattgatagaataactgtcatcaatcagattcatttcacgaactgtacgacggtagttattgacgaaaatgttacgcataagcgtatacatccatcctttcagattcttactatacgtaaacttctcatgattgtccaatgcttgcaacacacagtcctgaaccaaatcgttggcagaatcacggtctgccgtcaacttatacgcaaaacggtgcaaatccggctgtatgtctaatattccttgagtaaattctacttttcccatcgtcgtatctctattatctaattagtatggtacaaagatccgtctttttagaatcattataaatagcaattcttccgattagtttggcaatttttcctttacccctctcaaccatttctttttttagttgttcattgggcattcacctaaaacttaactcataatgaaaacaagctttaaaatggtagctatgctactggggataggaattttccccctctgtgcccatgcacaaaaaaaggtaatcatcgaagatgaagaacccaactcgatcatgtttgtctcgaagaacaaagcaggagatgaaattatccgaatcatgaacgaccgttcacagatgcgttttcacgacccgaatgctccccgcttcctgctcaccgaccagaaagggaaattcgccctgggcatcggaggatatgttcgtgcaacagcagagtatgactttaacggtatcgtaaatgatgtcgatttctatccggcattgattccacaacgcggaagcggcaattttgccaaaaatcaattccagatggacatcaccacttctaccctattcctcaaactggtaggacgtacgaaacatctgggagacttcgttgtatacacagccggaaacttccggggtgacggaaaaacctttgaattgcagaatgcttatgcgcaattcctcggtttcacgatcggatatagctacggttcgttcatggacctctccgcactgcctcccaccatcgactttgcaggtcctaacggttcagccttttaccgcactacgcaattgagctatatgtgtgataagttgaaaaactggaagtttggcgtttctatggaaatgccttcggtagacggaacaaccaacaatgatttgtctatcaacacccaacgaatgccggactttgccacttccgtacagtataactggaacagcaacagccatattaaattaggagccattatccgcagcatgacttattcgagcaatgtgcatgaaaaagcctattctgctaccggcttcggtctgcaagcctctacaaccttcaatattaccaagaaattgcaggcatacggacagtttaattatggaaaaggtatcggatcttacctgaacgatttaagtaatctaaacgtagatatcgttcccgatcctgacaatgaggggaaaatgcaggttctcccaatgctgggatggtatgcagggttgcaatacaacctttgtccgagcatctttatatccggcacatatagtttatccagactttattctgaaaacggatatccaagtgaaaatccggaatcctatcgcaaaggacaatatctggtagccaatgctttttggaatgtaagcagtaacctgcaagtcggcgttgagtatttgagaggatggcgtactgatttcagttcttcaacccgtcatgctaaccggttgaatatgctggtacaatattctttctaaccaatgaatatttcttctaactaagtgtgaaagaattgtccggttctatatagagcgacaaccaataaaccagtatgggaaacaatagcttatcccatactggatttcaataaatattattctctagagttccccgcttgccctaaaaataacagctccagtcactcctatcacacagtctgctgattctgcccttttttctccctttacgactaatcttacagaatgcttgccttgcggcaaattcaaaatatggaaaatattaatcccccgatgctcttgattcgcataataaaagaaacaatcaatggtgcctttcaatactccgtcaatatatacgtcggctttaccaccttcttttatccaccacccttcaatagatactcccgtcccttcaaaattcagactaagttcatcccccgctttattgctaaatatagcggacttatccttatccatcatccacgaaccgctcaaattccatcccggatcaatcatattcaatcttttatgaaaagccactccttgaaaagcatcttccatcggaaaagctacaggttgctgccgcacaatcattacttctttctccatcacttttccttcattctgaatgattatatcctgagcatattccattgttctttttacggcagaatgaaaagaataactagtatgtagaaataatgaatctcccatttgtttcactgccttctgataatcaaccggcaaaccactaaatcccttcataactcctaaaagggcaactgcatttgaaggattacaatctgaatcagttcataatatgccctattttatcagccattttattggccgtttgcggcatccccggacacataaaacctatataatcagcctcaatctgaaagtcaatatcatccgcatgaagattgtagtcgggatgtcctgattgcggtggaaatatactatcatggaagtttttacgagcctgcacattagcatgccatagcttatagttagctttagccaataactcctgatattttttggccggagcatccatcccgtatttatccatcgtttccatgaaagtcaactgaacatacatatcatcttcatattgcgaaaactgaaagtataaaatacaaatattttctgatcattattacaatgttttatttaatataaatctatatacattacctgcaaaatcggcaacgtacaatgcatttcccaatacggcaaccgaagagaatatggggacacctgttttaaatctccccactaacttaccatctgtacggttcagcgcatagagtattccatcggaagcacccataaacacggtatcacccatcaatacaggtgttgtttccactgtggaagacggtggtatggaataaggagatgaataaattaaggatggccccgttttaaaatgccatttttcatctaaagtctgacgatctaaagctattattccattattagctgttccaaatataatttcagattcagtaaccaaaggagttgaattcacatcgaccgaacagcctaacttcttacgtaaaatgatctttcctgttgtcggatccaaaatgaacaatgaatgagaagaaagaagatatacgttattctccacccaagtaactgaagctgaacgatagattagttcaacatctttgttctcccacaacaaacaaccggtagtcgcatcattagcatataatcctttccagttagcatgcccaatcaaaacattctgtccaaaagaaagtgtagccacgcatccctctcctcttgtccaggcctcatttttccaaagttgtttaccagtaggtgcatggaatgcatacaatgatttccccgttcctgcatacaacactttgccaaccgctgccaatccgtcatccaaaggagggagtattcctgtcctcaaatttttcccccaaaccaatgttccgttctccgcatcaatcgcatacaagtttccatatacatcctgggcaaaaaccaatccttcagaagcagctatactgctacgtaccgaaccacgaactgaatatcgccaacgaatggttccactctgagcatctatacacacaacggatgcttttcccgacatattatcatccacagaggccatgaaaacacattcttgataaaccaaaggaacagacatatatacggaagcacctatatttttaacccatgtcaacctcaaacgctgctgttgttctataggttttccatatagaaccgaacgtctagtttgctttacttctccattattgaaaatcgcttcaactactaccgttattcgccgattcttccatcgagaaaacaagggaatctcatcataccaattaaaatcactttgacgtaccaaaaacttatccgatacgacttttcgtccctcatattcacaccaatagcgtatagaacgtattggcgatgctgtataataagcattaacagatagggggacactgcccgaaggcagcacaggtacctgcccattttccaatgacacgatatgcaaaaaaggagagagataactgtagcgcaactctgaagtcagtccgcctttcgcatcaactgtcagcacccggaaagaagaaagcgcatgatctattcccccacaagcaggcgaaggcgtacaaatcgtatatacccctgtcggttcatgtctatacatttggttcacatgccaatgtccatatagccaagctttcaaaccggctgccggtagatctatatattctgtgtcactaataccatacttaaaagacaatgtatcttctgatatactatgattaaagacaatcacagatttcctcttatcagtatgagccaaatcattcttcaaccaatgatatacatcttctttcgtatagtaaggcgaataatccccatgaagcatgggagtcatgacataatgtatatttcctacttcaaaagaataaaaagtgggtccgtaaatcttctcgaaaagctcttctccataacctcctttgactaaatcgtgattacccataccatagaatacctgtgtatcttccattaaagacgtattcaacagttgaatatgactattcaaacctgcttcataacaaatgtctcctgtatgtacgataaaagctattttctcattatttgagtaatcacaaagattatctacccactcttgattaccttcttttccacgaatctccgtatctgaaatatgtataaaccgatgggttccatctgccagaataccattccgacaaggatatacaggaaaatcatattccatacgtcccgtctctatcggtcgatagtatgcattgtccgttttatatccggaaggagtagttataaaaagaaaatgcgcacgagtatgtcccggcagtctgaaggtgccatctgaatctgtagacactacgttcaaaccatcagagactgatacatcttgcaacaatttttctcctttgtcgaaaagtccattcttgttttcatcgacaaaaactttccctgcatattgtgccatagtttgatgagcgatgcagctcaacagactaataaccattccatattttataataataccacacatttactcacctttagctatctgtatctttaataaaaagggcgacagtagctgaatctatcggcaccatcgccctcttcttatagttatctgaaactattcttttgtaatgtattcaaaagctcctatgtctattttctcaccccagatacgcttattgccaataatatcccaagcactttgaactgccggatttgaaccggcatcaatcaaaggcgaagtagactgcaactgataatcacccgaaccggcatccataaaaccaggtccgtcggcagctgcattgctcgcattcaagatgatacacccttcggttgaacttggcgtatttccaccattatagacaagacctccctgtattgcattatttacgaaaagggtgctcttatttacatccaaatatccttgatgattcgtaccgattttatgcacattgccccaaataacggaattatatacagcaccgcgatttatacgcaagccactactgctcccgctactttcattattcacaatggtcacattatacaatcgcgtaccctcctgcgcattaacaatagaagaagttgcctttgccgatccgttatcagcagtcgtattattgcaaatcaaacaattaatcaacgttacattaaagaaagcaccaccggcatctctataagacttattatttcttatcatacaattccttagaatccaaccaccccagaaagccacagaaccttctccttgagtaacatttgaacctgtaaatacgaatccgtccacatagcaatgaacaccggcagacaaaacattaccatatattgaaggccaggtattggtaggtgcagcgacaagagtagatttcttggtcatatccctgtctttcagtttattttccgtaccattaaatcctccatacgtattaactcctttcttaagataagtccagctcttcaaatgatattcaccttccgctatccaaagctccatgctaccataatccgtacatgccgccagcccctcttctactgtaccgaaagccctttcccagcttgtaccgtcaccagatgcacctgctttcacatagactatctgattacaagcacgttgtgagataaataaggtatccgaaacatcagtaacgtctccggaatttttcactacaatatatccattacgttcttcatctcctgtattgggatctatagctatctttatcatgatatcctgtacaatatctccttcaaacggtggagttgccaatacttttatccaactttcggacgcaacacagtcatagccgacatttaaggaaaccggcatatctatattttcaccagccttgacaaccaatctgtctttatcagcttctgttaacgaaatagacaacattttctctacgttagtctgaatgacagtcagttcagtttttatagtcttctctgtatctgttagtgtcaccaccttcttcaattcacgacctgtagtattcggagcaacttttactttcaagtggttcttgtcaatcttcgtaaaagtaaacccatcttcctgttgtacatcggtagtccagtccttgtccgttattacatccaagattgtttctccgccatttacattaaaataaattatttttttctgtaaagtgataagagaaccacgtccattctgcttgactacaatacgagtagacatctggtccatcagacggatttcaatccagccttcacgcggttccatgtttggattttcgtctatttccgtaacaatggagtccggcagcaaagcctgtccacgataacgttgcaacttaatccaagaagcagacgcttctgcaaaccatggataagtagaatgaagcggcaatacttgccgtgaagcggcaggacccgtaaaaaggtcagcctgtacttctatttggggatctaccctgcgcaccacatctgtgtcgtcacacgaaacggacaagacaagcgccagcattcccaataatccactcaacaaatagtgaggactaatatattttctcataatattctacttttagttattcttttcaatgacttgcaatccattcaatactgctctcgatggtacatcagaaggggtattcattatttcaaaagagacaggacttcccgcttgttccaccctgcgcaccatcgttgtagaacctccgccatcaagattcaatgcctgataacacccggctccctgacataacagcatcatgtcttccagaagcatgccattggaatattccggttggcgtccgtcaatcacaaacagatataccttcttattatctttagatactccgacaaatgtacggggatgaaactgcatcgcattatcattaaccgtgaatttaccagccaactgtccgtctataagcaaacgttgccaaccggagagagcatcccggacatggtctttcacagcattaaactcttcaacaggcgtgatatgggctgttccgtcatccaacaaataaaaagcatggtcggcttcccatcccagtttagtccaaagcgcaacgccgtctttatagactaaaccacccggtatccatgtatcgtccgttttcgactgcgaataataatcaccattcgttcctaacaacacttttctcccgctagcctccgccttttccgcttgcactttcacttgttgttttagtatcccgacttcgggtttgttatcaggagtggaaactgcaatcgttacatttttagtcaagtcaatctctgctatcaacatacgggtaggatgtgcacaatatgtaaaagtaacgtcggttatatgaatcccttcatgaagatcataagcagcctctttctctaccgactgaatgtatgggacattatctgctattccttgcattatcggaagagtagcccctttatggggagctgaattttcttcattggaacaactgcatgaaagtaccatgaccatcaacagcaatgaggtacgtaaacttttaagtatatacatataattgtatttcatagtcttctgttattctttaattaaaattgagtcagtaattactcccatcccggattttgtggcaacaagttcggattcaaggagatttcatccaacggaatattatacaaatagttcttcgccttaaaattcatagaataggtgattttcttggcatacggagtaataaacccatcctggtcgaacccgatttggtcccgaatagtcttaatttcatcggtcgtatataaatccggatccatcttagttcctctacgcacacgattgaaaacaatttctcctacattccaacggcaaacatcatcccaacgataaccttccgcaaaaagctcgacacgacgttcgcgacggatttcacggatcagatttttattcggtccttttatatcaggatatttggccactaaatcaggatcttccaacggattctcatccaatttgaaagtaaaaccggcacgggcacgaagcgcattgactgtcttatccagttccggatcttcacccaattcagctcccgcttcagcacgaatcaacaaggcttcggcataccgcattaccggagcatcgatgcctcctttatgatttccaactaaaaattcggatgctttgtaaaatttgcatattgaatatcctgtacaagaagctccataaaacgttcgcgtatcggagttaggaaggatagtatagatattaggagcaccgccttttagcgaaccaccgtcttcacgatatagatagcgtgcatacctgcccggttccggaagacaaagggtttgtaacaaacgcccgtcacgattcttcatttctgcattatatcccatattgggatgatggcaaccacaaagagaaataggtttccctgtattcgagcagagatactcttcaaaacaatcacgactcattcccatctcaccattaggaataccactggaaacattgtgtccctcattgatagccgggtcatactcacgagacaagataatctccggattgccattataattatcctgaataaaaagatcgaaataattttcgcccgtagcggaagctttatataaagaatatccataatccatcagttctccggcagcattataagcctctttcagatattccacatctccttccatatcacgatagcgcctccaggttccttcatacaggcaaatacgcgctttcaacaataaagctgcatcacgactgacccgatataccttcgttttacgaggcaaaaattcaatagcctggttaatcgtcttcaaaatagaagccatcactactattcgcgaatcacgtcccttatataaatctgggtcatctttgtccaatgctgtatcataccagggcacatctccaaaaagacgcactttattataataatcgaatgctttgaaaaataagatttcaccggcatacttcttcttatccatttccgaagccggagatcgctgatagttctgcaaaaagctattacagcctctcaccgttgaccaattccaatctgaattgctcgtcaatttggtattctgaccatacgtaatgctactacctcctgacactaatatattatcagattgataatcggccataatcatagcacccacattccacgacagagggtctccatgtcctttaatcagctttggataatataaattgcaatattgctccaaggcagcagcattcgcagtttcccagaaataatcaccggagatggcatcaccgggttccgtatccagataattacatccggacaaaaggagacatgaaaaacaaataaatgaaattatatactgtttcatagtagctgattatattaaaatgtaatatttatcccgaatgaatagcttctcataaaagcgtattgcttaccggcattttcgctttgtaaacttacgccctcacttgttatctggtccacaatatccggagtcataaaaggtggtaatcctgtcttctcccacaaattcatgccgctgacataaacacggatttgctccatttttaacttagacaaccacttcctaggtatattataactaagggtaatatcctttaaacggatataagcggcattctgcaaatattttgtctgtacctgcctgctcctgccatttccatctgtattgggacgagggtaataagcagtcggattttcataagtccacgtattatctatatgatattgggtaacattagagttatatattcctcgggaaaatccccaaaagacatcacttcccgtccacaaatcccgtttcattacaccttcgaaaatagcacgtatatcaaaaccatgccaaccaattcctccttgcagattaaaacgatagcgcggggtagaattacctatcactttctggtcacccggattgtccaacgtcactttgcctttatcaataataccatctccattcaaatctttataacgaatatctcccggataccatttgctcgaaataaacttctgtaggtaattcatcttcgcagcctcaaaatcgtcctgaatatatccatctgtcacatatccccagatttcacccaacttctgtcctttatgatacataccggaagccaacgagccgttcggattatcatacttggttatttctgcctgataatcagacaatccgactgtgagtgagtagtccaacggactgcctagtacattctgtatccggtctttccaagtcatttccaattcccagccaacggttctcatatctgctatattctccttaccaccggaagttcccaatacagcaggcaacgttacggaacgtaccatatctttcgtatcacgcacgtaaaagtcgaacgaaccaaacagacggtttttaaacaacgaccagtccaacccgatatcttttgttataactttctcccaagtaaccatactaggcagagtaggtatattcaacccattcacaatcttaccatccatcatataattagtaagtaccttacctgaaatgatagacatgaaagaatggttaccgtcagtaatctgatttcctaaagcaccaatagaagctcttatttttagattatcgaccactttgctcaatgatttgaaaaatttctcttcagaaatacgccaccctacagaagcggaagggaaaaaagcccaacggtcatgtttggcatatttggaagaaccgtcataacgtccgttcacctccaacaaatatttggagcgataatcgtagttcaaccggaaaaaagcaccttgtaccctccatatatcagatccttcttcattttctttatagttgatggcaagatcggatataggcatttcattatcatacaaatctgtcatggtatatgaagtggaagcgtatgttttttcttcctgattgtaaccggccattaaagaaagattatgaacatcattgaaagatttcttatattcagcccatacattgattgcctgataaatattgttcgaattataatttctcacatagttaggcgtctccactaaataagggtctcttccttccggaaacgtctgtgtcatttccttacgatggaacttctggacagtggaataacgattccatgaataatcacctttaacggacaaacctttcatcggatgaaggtcaaaacgtccggtataccattggtcccaggtttcttttttattgcgaccggcaagggccatcttacctatgatgttataatttccaccatttaaataaatacctgcaaaatcaccattcggaagaaagacagataatgtgggatacatacgatatacttcataataccaggttaccgcatccgatcctccattgtccatatatggttcatcattctttatattactcattcgagtggagaagctcatatccagccagtcagtaatcttggtatcgaagttgaacgacagattaaaacgtttgtacgaatcattgccataacgaaaaataccggactggtctttataaccgatagaagcataatagttgttgcgttctgtgccacctgaaagactggcattatgctgttgcataaaagcagactttctatagaactcatccagccagtctgtgtttccgacataggcccaccccggagttgcgggagtatagctggaatgctgtattccttccgtatcgaccagaattgccggattatgttccgggtcagcaatgtgcgcatccaaagccttcataaacttctcattaaaataatagcttcccggagaatcataatcagaaatcttattccacatacgtgcccagacatccgaacggggcatctccggtaaacgggcaggtgagctccatgaaaggttattgctataagtcacccgtgtcttctgattacgctttcctttcttagtagtaacaagcatcacaccgaaagctgcacgcgctccgtatacagcagccgcggaagcatctttcagaactgaaacgctttctacatcttgcggattaaccaatgacaaatcggatatttcaaccccatctactaaaatcaaagcattaccgccattcaaagatgtattaccacggatattaatcttggcagcttgattcggctggccactattgaaagttatatttagattaggaaccataccctgaagtccttgagcaatattaccaataggacgattttcaagaatttcaccggaagcagttgttacggctcctgtcagattcagctttttctgcgtaccataacctacaactaccacttcattcaaagatgccgagctttcttcaagcatgatcttcaaagaatgagtctcacccgacacccagactttctttgtggaaaaaccaatataggatgcgacaagcagaacgcgtttgctatcttttatctgtagtgtaaacgaaccggaaagatcggttgtcgctccttgagtagtaccctgtacggttatattaactcccggcaacggttgtccggtagcatcaatgactgttccttttacagtgtattctttaaattctacaggtgtttctgattttctttcttcttttcggggaaggcggacaataatcacttgtcttccttttactgtatatgtcagttgtcttgggggcaatattctattcaaaatagatacaactgactcgttttgtgctttgactgttactttttcgttttcttgaagaacattttctttaaagaagaaaacgtaattactctttctttccaatgttttaaacaaagtctctaaagaaacattcgtcaagttcaatgtaacattcgtggactgaaggagcataaatccgtcttctgccgaaaccttcggcaaataagacgttaaaagaatgcataaaagtaaaaatcgaagcccaatattggttaaatatttacttttagcccttatttgagagttatttttcatatttttgtattgttagattggttataactttggtgagttatgttcagttctaatttgaaccggatgatatttcgcagatattatccggtttgttctttttaagggggtatgtttttcatttcttactttttaaaaggttatacttcattttgatttttcaggcgtgatgtatatctcatctccttgcctgattatacttaatggcgtagccaatgagatggattccaacacttcatcaagtgtacagtttaaatcaaggcttccataatatttttcatctttcaagcttcctgatatttctatttttgtgttataatatctcgatagtgatttcaaaacatcagagagtttctgcccgtcgaagttcattgcatcatctttccagcaaatgtaattatatacatctacttcatccacttttaccacaccattctctttagagagacgctggttgggaaccaaacgttttttttctttattgtccacttttacatctacacttccctgaacaagaacaactgccgtttcagtatcttttgcataatcagttacattgaatgaagtacctagtacggtaacttccaaacggttcgtttttaccacaaaagggtgcgcagcatctttccggacatccaaataaacctctccttgtacattcagttttctttttgccacaaaatctgaagagtaagaaatacatgatccggagtttatccataatgaagaaccatccggaagaattattttggaacgctttccataaggcactactatctggttcaccgagactttatttcctttggaagcagcaaccaattgtttgtccactgttactgcaccatcttcatccacccgaatttcagcattatttttatccaaagtgactgcttgtttaccatctaagataatttgtacttgtcctgaatgacttaaagaatcaattatatggactgtaacatcggtagtttcctgtaatcctgatctggatagaacataataagttcccaaacagacaaacaataaggctgccacacttgccacgtaagtcataattctccggtaaggaaatgtttttctataagactgtactggctgtgaaggttgctgttgaagtttactcatcattttgttgaagctttgcatcttatattcccgggaagtaggtttactattttccaccactttcatactgcgaaccattgcaacagccaattctatcttttcttcgcaaccgggatgctgaagtttataggattcaagattaaatccattatcagaagaaccgtatcttgcccattggaaaaaatcatcatccaataagaattcttctatatctttataagtaaattgagccattttctgctttattttctactatgacaaatgaaccgatgattttatactcataggaaatgttttttttcaaagaaaataatcagcagaatgaaaaataacgagaagcatattataataatctgtaatacaattatatagaaatcatataaatgaaaaataaaatagtagtagatgaaacttctttcctgagtttctccatagaacgggttaaaagattccttgctgactgaatattaatctccattatctctgatatttcttcaaaactcatttcatgcacaaagcgaagataaataatctctttctgacgtccggtaagcccttttaaaatgtgatgaatttcatctgataatccttggtcttgcgttaaagatagttgttcatcaatcgtataattcaaatcaaaagcgaagtcatagtccggcaacggttgaagtttcgcattacgaagtagttggttataaatcaaattttttaatgctcgaaacagaaaagggcgcaatctcgtattatcctcaagaattatctttttctgataaagcttcaaaaacaaatcttgaatcaggtcttctaccatttcattatctcccccaactctacgaccataagttaacaaatcatcaagaaacagacaatacaattgggaaaatgcattttcatttccatccaaaaattgtatccataaacttattatgtgcttttgatcgtcgagagtcataaactgggtttttaagtcaagtcctaaaaactaaactacatttcttcgtatctcgtttaatgctaacttgggacaatattcgcaaaatatcctgagatacgcaaactttctagattaaaagattattttatggtataaaaaagaaaagggggacagcatttgaaatgctatctccccctatcattattaacttggtttttctataaagatcgaatctatttaaaatctgtagtcaatgctaagaccaaatactttgttggtacgactatatacattggtaccacgtaatcctgtaccattataatttgagaattctttcttataatcttcgtaagtagtccacatataacccacattcaaagctgctctctcactcaatttcaccttcgccccgaagcctaatgtataggaatcgcaagaaaaactggtatcgctctgaaagttatcggacaatccgtaatccgtaatttgtccaccacaacttaacgacaattgtttggtcacatcccattcaatacctgccagatattcgttagtccccttagtcaaaaacttctgcttgccatctgccatacctgctttcttatcatcataaaagtgatattctacagatgcacgcagtactggaagaaactcataagccactgctaccgaaagcatggaaggaatatcattcggagtattgacaccgtttttatagttgcctatcaaagcttcagcttcggcaggatagtccaatttatgagttttattttcaatattcatgttagccttgaactcatacttagctccaatgttcaacttgttccattttacatccacgcctatcaccggagttaatccccaacctgtctggtcacagtccaaagccaaattcattaagtctgtatctcccactttagcatccaggaatccctcataacctcctgaaaaataattcatacgggcaccggcaaaagccgaaagccaatcagttattttataagataaacccaactgcaaggaatagatgtattgtctgccatccatagcactattgatgatatatttgtccggagtcattatcggccctccttgcgctactccatccaaactcttttggaatatttttgccatagcagccgactcaaatataggtagaccgtcatcaaatgaagcctttccacctccggcagttatagcgaagaagccggaaatagtccaatctcccttcttatatgcggcaaacacactgggaataaccggtgcggcagcttttcctttataatacttactataaggctggtcggaaacggtagggacaggagcggcaggatttgataaatcaagaccactatatgtcataaagctagcatcaatatttctcgtctgaaaggcactctgaatactcaatcccatatggaaaccatcgtttggcaaaaaagccaaaccggcaggattggacaaagctccgtctatttcaaaggtagcaccacgagatagcatacgaagaaaagcagcgtgttgattagtatttgtcagaagacctccggcaaaagttggaattgaaacgattagcattacaaatccaatcaaggaaatttttctcatctaaatctttttttaattatttcgggcgcaaagatacgatattattgcacacgagagatacgtttgtgcatttattttcgttttgcctcctattttaattgaaaaagtaaactgtttctaatgaaacaatccatatttatacccccaaaaaggataaacaattcaccctattttagcgtttactagtaagcaataaaaactgaaaatattatggcctatacaatcgcatttttcggcacaaagccttatgacgagtcctctttcaatgataaaaacaaagagtttggatttgaaatacgctattacaaaggacatctgaataaaaacaacgtacttctgacacaaggagtggatgcagtctgcatctttgtgaacgacgttgccgacgcagaagtaatccatgtgatggcggcaaacggagtgaaactactggcattacgctgtgccggatttaataatgtagatttaaatgctgccgccgctgccggaatcaccgtagtgcgggttcccgcctattctccctatgctgttgcagaatacacggtagcacttatgctatcgctaaaccgcaaaataccccgcgcctcctggcgtaccaaagacggtaatttctccctgcacggtctgatgggattcgatatgcacgggaaaacagcaggtatcatcggcacaggaaaaatagcgaaaatactgattcacatcttaaaagggttcggaatgaacgtactggcttatgacctctatccggactacaacttcgcccgtcaagaacaaattgtttatacttcactagacgaattataccacaattcggatattatctccttacactgtccgctcactgaagagaccaaatacctgataaacgactactctatcagcaaaatgaaagacggagtaatgattatcaataccggtcgcggacaactgattcataccaatgcgctgattgaaggactgaagaacaagaaaataggttccgcaggactggacgtatacgaggaagaaagtgaatacttctacgaagatcaatccgaccgtattatcgacgatgatgtactcgcccgcttactttcattcaacaatgttatcgtcacttctcatcaagcttttttcacacatgaagcgatggagaatattgctgcgaccaccctgcaaaacataaaagattttatcaatcacaagcctttattaaatgaagtgaagaaataaaacttttaagccgctttctttgtttatcaaatatataaacaaataagagaaaggacagtttttatgaaaaaagtaatacataaagcagatacaagagggcattcccagtatgattggctggatagttatcacactttcagttttgacgagtacttcgactccaatcgtatcaattttggtgctcttcgcgtattgaatgatgataaggttgcgcccggacaaggttttcagactcacccgcataagaatatggaaatcatttccattcctctgaaaggacatctgcaacatggagacagcaagaagaacagccgcattattactgtcggagaaattcagacaatgagtgcgggaacaggaatcttccatagtgaagttaatgcaagtccggtagaaccggtggaattcctgcagatttggattatgccgagagaacggaacacccgtcctgtttatcaggatttcagcattgcagaactggagcgtccgaacgaactggcagtcatcgtatctcccgacggtagcacacctgcttcccttttgcaagatacctggttctccatcggcaaagtagaagccggaaggaaattaggttatcacatgcatcaaagccatgcaggcgtctatatcttcctcattgaaggagaaatagtagtagacggtgaagtgttgaaacgtcgtgacggcatgggtgtttatgatacgaacagcgttgaactggagacattgaaagactcacatattctattaatagaagtacctatgtgatatcatcattaaaaataataaactaaagctgccagataatcttatggcgaaattaaacatagcagatatccgacaggaatatacgaaaggcgggttgcgggaaagtgaacttcccggcgacccgctttcgcttttcagtcgttggctgcaagaagcgattgacgcagaggtggacgaaccgactgcggtcattgtaggaactgtatcccccgaagggagaccgtccacacgtacagtattgttaaaaggactccatgatggaaaatttgtcttttataccaattacgaaagccgcaaaggcagacaattagcacaaaacccatccatctccctctcttttgtctggcacgccctcgaaagacaaatacatatagaagggatagcgacgaaagtttcaccggaagaatcggatgaatacttccggaaacgtccttataaaagccggattggcgcacgaatttctccacaaagtcaaccgatagcaagcagaatgcaattgatacgatccttcgtcagagaagctgcccgatggattggaaaagaagtggagagacctgataattggggcggatatgccgttacccctacaaggattgaattctggcaaggacgccccaaccgtctgcatgaccgttttctatatactctgcaaccggacggtgaatggaaaatcagtcgtcttgctccttgatttcgtcgatttttcttggcaactccaacgagaatacgtaatattgcaactataaaatagtcagcttatgacactggattatatttatcacagcggtttcgccatcgaaatggaaggtgtaaccgttatcatcgattactacaaagattcttccgaaacggaacacaaccggggaatcgtgcatgattatctcctgcaaaggccgggtaaactgtacgtattggctactcatttccatcccgatcactttaaccgtgaaatattgacttggaaagagcaacgccccgacattcaatacatcttctccaaagatattctgaagtcccatcgtgccaaagccgaagatgctttctatattaaaaaaggagaaacctacgaagacgacacgatccgcatcgacgccttcggatcgacagatatcggcagttcgttccttcttcacttacaagattggagtatcttccatgccggcgacttgaacaactggcactggagtgaagaatcgaccgaagaagagatacgaaaagccaatggtgattttcttgcagaagttaaatatttaaaagaaaaagtgcctaacatcgatctagtgctattcccggtggatcggagaatgggaaaagattacatgaaaggggcaaaacagttcatcgaacaaataaaaactactatatttgtgcccatgcacttcagtgaagattatgaggggggaaatgcgcttcgtagttttgctgaaaatgccggatgccgttttatcagcatcacccatcggggcgaaagttttgagattaccaaataaacacatgataattatgaataaatttacgattctgtttcttaccctgttccttgcattgccgatggcgatgaaggcagattctgcaaaagagaagaaagatgacaccaggtaccttgtaggagctgttcctgaagtagatggtaaagtagtattttccaaagagttccagattcccggaatgagtcaggcacaaatctacgacacaatgacaaagtggatggacgaacgtctgaaagaaaataaaaatattgatagccgcattgttttctctgacgaagcaaagggaacaattgccggtgttggagaagaatggattgttttcagttccagtgctctgtcattagaccgtacactggtcaactatcagattaccgttacctgtaaacccggcaactgcctagtagagcttgagaaaatccgtttcacttatcgcgaaacagagaaatacaaagcggaagaatggattactgataaatatgcgctcaataaagcaaagaccaaattagtgcgcggcctggctaaatggcgtagaaaaactgtagacttcgcagatgatatgtttatggatgtagcagtagctttcggagcacctgatactcgtccgaagacagagaaaaagaagaaagaagaagagcaacaaaaaccatctgttgtggccgctgccggcccgatcgttatcggtcagggaggtaaagttaccactaccgaatctgctcaaaccaccattcctgcggctactttgactcctgccactccggctaccaaagttgcatccgatgcatccggttatacagaaattgatttgaaacaaattccgggcgaagtatatgccttaatgggaagtggtaaattagtaatcagtattggaaaagatgagttcaacatgaccaatatgactgcaaatgcaggtggtgcattaggttatcaatcaggaaaagctgttgcatattgcacactttcacccgaccaaccttatgatgctatagaaaaggcagacagctatacactgaaattgtatgctccgaaccagacaactccttcagctgttatcgaatgtaagaaaatgccttcacagacaactccgcaagccggacaaccccgtacctatgttggagaaattgtgaaactcttaatgaaaaaataaggaaaattgcaacaatggaaataaaaagtaaatttgaccattttaatatcaacgttacaaacctggagcggagtatcgctttttatgagaaagcactcggcttaaaagaacatcatcggaaagaagcatccgacggttcattcacactggtttacctgacagataatgaaactggtttcctattggaattgacatggctcaaagatcatactgctccatacgaactgggggaaaacgaaagtcacctatgttttcgtgtagccggtgattacgatgcaatcagggcctatcacaaagaaatgaattgtgtatgttttgagaacactgccatggggctttatttcattaatgacccggatgattactggattgaaatacttccacagaagtgattttacataaaaagtgggggcaggataattatcctgcccccactttttatgtagaatatatgatctatcaaacacatagtatatatacctaaaacaacaaatactataaatatgtatccgaaaataaacaccaccttgccagttgcttaatcagaaaaaagccactcctcaatgattaaaaggcaaccggactgatgatccgtttattgctacagcctttattttttatgtcggctagctcttttcttccggatatctgctttcatcttcgctgcacccgaaccatgttgtccacgaatatacgtcgcttttttcgctttcgttttcaccttttcctcttctttgggcttatctttcttacctttaaaaacgataccacccatgattgcttcttctatactcatataatcatttattagtattcaacatttccgatggcaaagataacccttttctacggatttatttatctttgcaaagttaacaatcgtaaccaccaatggcaacaacaattctttctgcagaaaaggacccgatgggagccgctatttctgactatttcaaccatcatagagctgatcgtttgcgggtattttcttctcaattcgaagaagatgaaattcccgtcaaagaactgtttcgtagtatacagtctatgcctatactagagcgtaccgccctgcaaatggctactggacggattttggatgtaggtgccggaagtggttgccatgcgctggcacttcaggaaatgggaaaagacgtatgcgccattgatatttctcccttatctgtcgaagtaatgaaacaacgcggagtgaacgatccccgcctcatcaacctttttgatgaaacattttccgaaacattcgatacaatcctaatgctcatgaatggttccggaatcatcggacggctgaataatatgcccgaatttttccaacggatgaaacgtattctccaccccggtggatgcatatttatggattccagtgatttgcgttatctttttgaagaggaagacggtagcatagtcatcgatctggccggagattactacggagagatcgacttccaaatgcaatataaagatgtaaaaggagacacattcgactggttatatgtagatttccagactcttagcttatatgcttccgaatgtggttttaaggcagaattgataaaagaaggaaagcattacgattacctggtcaaacttagcattgcttgaaaatgcatcttcatatagtgacggtatacactccggatagcgtcactatataaccaaaatagtaacgccatcacatcaggatagcgttactatttttatatactcatatatgttccgttggaaacatctgatgaaggctctcttttatttcagcatttcattaattgcctgcacaagagaagcaaactcttcctcattatataaacgagtcagctttacaattttcccttccttatcaatcaacacgtttctcgttattccagattcacgtaatgcatacttcgcaaagatatcagctcccggatccagtcctaacggataagtgactccggtagattttgcaaaagccagtactttgtcaagcggttcgtcacggtcaatgccaatcagagcaaagtctgcattatttttatgcttcaaccaaatatccttctcgataaacggcatttctttacggcaaaccccacaccagcttgcagtgaactgcaacatgacaactttaccacgaagggaagataaactcacttgcttcccatctgtcaaggtaattgtgaaatccggagccatctctcctacccgaacaatatatcctgtactatctgcctgaactgattttgcatccgcagttacttctacactatctgttgcaacttcaacattcgccgttcctttcttctgtccggaacaagcccatatacctatggctaaaagcgccacactacatacattcataattttcattttcatctaatcattggtaactttgcaaatataaaaaaagtatgcgatgtatttgcatttttaaaagaaattcatacctttgcacccgcaaaagaaaaacgcctctttagctcagttggccagagcacgtgatttgtaatctcggggtcgttggttcgaatccgacaagaggctctccagaatgaatgctgtttatcacatcagataagcagcattttttattaatatcttctttaagatttttgcttacgaaatactaccatacccacagccaacaaaatcaaaagaattccaatagcactattcagggtaaacagttctttaaaaacaaagacaccgatcacaacggctgtcagtggttccatcgcacctaaaatagaagtcagtgtaggtcccgcatacttaattgcccgtaccaaagttatattggaaatagccgtagccggcaatgcaagtcctaaaataatcagccatatataaccgtctgtcaccagatgaagcccggaagttgccatagctcctatcagatagaaaacagctcccatccccataacataacatgtcagtacagtggaattgatttgagcggctcgtgttgttcgaaccccaatgatgtatcctccgtaagaaaagacagaaatacaagccgccaccaatcctactattgtatcaccacttttcgcctccaactctcccgatgacagtaaagcagcaccaaacaaagacattaaaacagcaagcatcaccaaaagagatttcttttcatgaaagaaaaacatcattgccaatgatacagccaacggatacataaaatgaatagtcgatgctacccccgtggctatattctgataggcaatgagcaaactgaatgaggtggttgcccgcaacaaacttaataaaaaaacgactaacaaatctttctttgccagccggaaattacatcccgaacaccatccaaacagtgtcaatacaatagcagccactccccaacgataagaaagcacctcgaaagccgaaaaaccagctaacaacagagttatagaaaaaaacggagccagcccaaaagtggaggaggataccgccgcataaagtatacctttaatgcgattcatcgatatattcaactaattccagatattcacaatgcaaagattataaatatttctttaatgccaccattaatttcattttttcaatcggcttaaccagatattcattacagccgacctttattgcagcaatccggtcagaatcgaaagcatgggcggtaagtgcgacgataggtaagctagcattaaacttacgtatttcagctgtagccttcaatccatccagtactggcattttcatatccatcaacaacaaatcgacatgttggctacgcgctatttccactgccttttgcccattctccgcatgcagtaaatcataatgatccttcaggatagtagacaccagctgataattactttgtatatcttcagctatgagaattgttttccgaccggcactcttctccatcacttcgtcattcgcaccaaactctcctccggagatattctcttctttcttctcttctaccatagaaagtgtatcgacttcacaaggtaaaaatgcccaaaacagcgatccttcattgtgtaccgattcaaagccgactttacctcccatagcttctgcaattgccttgcaaatagaaagtccaagtccggtaccttgggcaaactcatcaagtttctcaaaacgctggaatacttttccttttttatcatcagctataccaataccggtatctttcacataaaaatagacgcctccatccttacatgcatatcccattttaatagaaccttttgaagtatatttgatagcattagtgacataattcgttataatttgtgccacgcgattacggtccagagttacccgacaacagtgataaggattgatttcagttaacacgatatccggattcttcaggcgctgtttcatggaagtaaacatgttttcaaaatgttcggataagtcgaacggttcgtatttcagttctaccgaaccggcttccagcttggataaatcaagtatatcatttatcagttttagcaataactcattattactattaataatctggatatagtccgccttttcttcttctccggcataagccatcaactccgaaaaacctacaatagcattcaagggagtacggatttcatgactcatattcgccaggaacgcagatttcaatttatcagactgctctgcctgatgtttggcttcctgcaattccttaatcattttttcacgctccgttacatcatccacgcgaattacaacaccatccacagatccatcttcaagaactacgggagtggcaaacacttcaacggtatgcgcactgtccaacgaaaacttcatctgttccgtctgtaatgaaacaaaagcacgttgcatcacacaattttcacagggagaagtacgattatatgtacttttatagcaaagttcaccttttttgtaggcttcaaaagaaagactttttgaacataacgaaatattttcccattgaaccatatattccttcgtgatgtaggccaaccctgaattcgtattgttaagaaccagttcattctgtcgtaccaaagcgtcctgtatttctttattctttagtaaggtcaattcagtctgcttataggaatcgatattttgcgtcataccgaacaaatacttataaggagcatcgttcaaagttgtggtttcaacaaggccacgcgtttcccaccattgatacatgccatctcctttaaagtcaatgcgatattccacatcccatacaccgcttcctagttctaccgccttttgcaaagtttcagcaaacttttgtcggtcatcaggatgtacgagagtcagatatttctcgaccgaattaatttctgatgcctttttcccatttttatcaaaaccttcaccgaaactcaccctgttcttagccggctcaaaaaaccaggtgaaggcattcatcgcttccatagtgacagttaacagctgtgcacgacgcttcagttcattttgtaaactctgatcccagcgggtatttaacagaaagcgtttgccatcatcttcaattatacttttgcgaacaatagtatcatagctgcgtccatccttcagtataatacgttccatgccgaaataagggttcccagtattgtatacctctaaatcagtcttctgaatacgctctacttcttcttcactcagcacatcataagtagttttatcttcgctggtaccaaacatgagcttactctcttcattgcaaaaaacatagcggaaatcattctctacatctttgatatgaacagataacggaagattatttaatatattatagaagaactgctcctttttctgcacctccgtattattctttcgggtaccaacatatttcaataccttcttattagaatcaaattcataaggagcaccgcttatcgtacaaaattgccaggttgagctatccggtaacataaccctgctatcaaaagaaaaagaaaaatcttccccattgctcattctttccattacttcagtaacctgactacggtcatccggatgcaaagtctccagatatagtgccatactaactggcttagactgatcgtatccattcagcggttcattatcactataaaataatttgggcactgcatcaaattcccaaaacatgatgttggctgccttcatagcaagctccgttttccggcgactttgacggagtacctcttcacttttcaccgtttctgtaatatcttcaaagataaaaatgtaattaacaaacttgccatcattatcataaagaggattaccattacatttcaaatagcaggtccgggtacgcgtagagaaaaagcgtttatcggttctctgtttatcgaaatcatacaaaaaactcatctgtaccggaacacaacgacgaactgcttccttcaccacgtcaggaaccacagaattttcatttatgttgagtttattaccaagaagcgtttgcgagtcagcgccaaaaattcggcagaagctttcattgcatcttaccagagtgccatcggctgtgaagaaacctattccaacaggaagtgaattaaatacagttagtaattgtttgtgttccatttctttatccttgaataacttagaaataaatattttatctccgcactatgcaaatatatacacttttacgattataatatgattttatagcgaaaatattattgccaggttataacatacaataaggggctatccacgatattgtgaataacccctatctcaaatgacatcccatatattatcattttaaaaagtacattttaatactcctcaatgactgtatttccaaaaatatcctttttaataattttcccatgaccgttaccatattcaattatttcgtttccaaatatatcttttttaatagttgttctattccccttatcatcctcgataatagtattcccaaagatatcttttgtaatcgtctttctattacctttgtcttcgcgaataatagtatttcgcagaatatctttctctatagtttatcaattacccttatcgtcccggataatggtatttcctagaatatcttcttcaatagtctttctattacctttatcatcacgaacaatgaaatttcctaaaatatcctcttcgatagtcgttctattgcctctatcatcacggataatgatgttccccaaaatatccttttcaatagtctttctattgcctttatcatcacgaatgatgatattccctatgatatccttttcaatagtctttctattaccattatcatcacggataatgatattacctaaaatatccttttcaacagtctctctcccttggtcaactcccgaatactcataattatcttcaacaagatttgcaccatagccctttattatataaggagccaaaataaactgggcaacaaacaggataaataaaatctttttcatggcgtttttcttttggtttagaacaaaagtaacgcaggaaaatcagaattaataagtgaattccataattgtcagtagggaaaaacctaaaataaaaaggattagcgcatgcagtaacggtatatccataatatactacctaattggtccccagaatggtcccccaaaaaagaaattccttgaaagtacttgactttcaaggaattcaaagtgttacttgaggttcctggcggattcgaaccgccgtacacggttttgcagaccgctgactaagccactcatccaaggaaccattatttctcgtttgcggttgcaaaggtagtacaaattttgaaactaccaactatccgcagcaatttttctttgtactttttttctttacatcgcactctccgcgtttcttgtccatcatatcctttagttcacagccacttacacagctgtcacaaggattctgattttctcgcgtacgacgaaaaaaacgaaatattccatatatgacgcgggcaatgcagagtacaaccagtactccgactacccaatcttgccaattattcatacaaacaatcctccaatctgataaacagcaaatgatacaagccaagccaatcccgttgtgtaacaagcagcaaaaagcgcccatttccaactacccgattcctgttttatagccgctatcgccgcaatacacgggaagtaaatcaatacaaacaacatataacagaaagcaaccaatggagtaatcggaattcgttctgccaaacttactgaatcagcatccggatcatctgcatataagacacctaatgtacttactaccaattctttcgctcccacaccggaaagcaagccaatacctagtttccaatcaaatcccagtggttttataactggctctataccacgtcccaactggccgatataagaattttcctgctgctcggcaactgtttcataagcatcatgattcggataataccccaagaaccagattataatagaagcaatcataataatgcctcccatctttttcaaatactgcgctcccttttcccatgtgtgacggaagatcgattttgctgtcggcatccggtaaggtggaagttccatcacaaatggagtatcatcacccttcaccagaaacttgctaaacaagcgggccattaccacagccagtacaataccaatcacataaatacttaacaacaccagacttgcattgttcgggaagaaagcacccaccaacaataaataaattggcagacgcgcactgcaagacatcaaaggatttaccaacattgtaataagacggctcttccggttctcaatagtacgggaagctataatagcaggtacattgcatccaaatcccataatcaaaggaatgaatgattttccgtgcaatcccattttatgcatgattttatccatgataaaagctgcacgagccatataacccgaatcttccataagagaaatgcagaaatacaaaatcaagatattcggcaaaaagacaataaccgctcctaccccaccaataattccatcaatcagcaaatctttaaatggaccttccgccatattattgcgtaacaagtcaccaatctgctcgacaagccattcaatccccatcatcggatattctccaatgacaaacgtaccctcaaacatcagatacataaaaaggaagaaaataggaaatccccagacacggtgagttacgatcgaatccagcacttttgttgtctgcgcctgctccaagtgattatctgtgaatgtctccttcagtgcaccactgataaatccatatttagcatccgtaatagccgattcacaatcctcattcattgtgtcctgaacacgcttcgacatcttatcacggacatggaatatctcatccgcatttggtaatgtccgcacaatgcgctcaatgtcaggatcattctccaacaatttaatggataggaaacgggtagaatatttatgacggataaattcgtttttggacacttcactttttacagcttcaatcgctttttcgatatcaggaccatgattgatatgaatatgccggaagacacgccccgtctttttatgttcacgtacataatcttccaaatgctcttcctcgtggttcttacgatcttccagagaatcatgccattcggtcaaatccttaagaacttccggattcatatttccctgtttatcaaagaagtctactccttcatacagattgataacaacatgaaacaaggtatccaatccacgatttttcttactgacagtaggcaacatcggcaccccgaacaacttactcaacagatgataatccaatgtatttccactggcttccaactcatcataaatattcagagctaccaccatgcggacattcatatctatcaattgagtagtcagatataagtttcgctccagattagaggaatcgactacattaataatcacgtccggagtttcatcgataatatgacgacgcacatagatttcttccggcgtataagcagacaaagaataagttcccggcaaatcgacaatacggaaatgatagccttcgaaatcaaaataaccttctttggcatccacggttacgccgctgtagtttccaacatgctcatgagcaccggatgcaagattaaataaagaagtcttgccactgttcgggtttccgaccaaagcaacattaatggtacggcgtttacctaacgccaaccgtttcatatcttcttcttttactgaaaggtcttcaggcaatccttcatgataaacggtcttctcggccagtttctttgcttcctcttcgctgataacttcgatcatttcagcttcctgacgacgaagagaaatttcataacctaaaactttatattttatgggatcttttagcggagcattcaacagcacttcaaccgttttacctttaatgaagcccatctccacaatacgtttacgaaaaccaccgtgccccaatacctttacaataacacctttttctcctgtttttaattcggacaaacgcataactctcaaaatttttggcaaagataattcataacttcggagcatgcaaattatttagaatgtttttaaatagcagcttttttcatcctctaaaagattcagaaaaaataaaaaaacttattgataaactcgtatctttgcaggtatgatacaacaacgcgttacaaaatatatagaaaaggaacatttattctcaccggatgataaaatcctggtcgcattgagtggtggtgccgactcggtggcattactatatattctgcatacagcaggctatcattgcgaagccgcacattgtaatttccacctgcgaggcaaagagtcagaccgggacgagttatttgtccgccaactttgcgaaagaatggaaatccatttacataccattgatttcaacacgacccaatatgcaacggaaaaacatatttcgattgaaatggccgcacgggaactccgctaccaatggttcgagaaaattagaaaagaatgtcaggcagatgttgtcgctgtggcccatcaccaggatgatagcatagaaactatactacttaacctgattcggggaacaggaattaccggtctgttaggaatccgcccccataatggaaccatcgtacgccctctgctttgtatcaaccgggaagagataattcgttacctgcaaaacatcggacaagattatgtgacagacagcaccaatctggaagacgaatatacccgtaataaaatccgcctcaacctccttcccctcatgcaggaaattaattcgtcaatcaaaaacactctgatagatacgagtaattatctgaatgatgtagccactatatataataaatgtatagaggaaactaaaaagaaagtcattacggcagaaggtatccgaatcagtgatttagtaaaggaaccggcacccgaagccatcttattcgaagtcctgcatcctctaggattcaattccgcacaaatcaaagatatcgcccattcgcttcatagccaaccgggcaagcaattctgtagcaaagaatggagagtgataaaagacagagaattcctattaatagaaacagctgaatctgaaaatgagactcttcctccttttcaaattatcaaagaagaaaaagaatacaccccggattttctcattccacgtgaaaaggaaattgcctgttttgatgccgacaaactgaatggagaaattcattaccggaaatggcagccgggagacacttttattccttttggaatgaaaggaaagaaaaaaataagcgattatctgaccgaccgcaaattttctatcagccaaaaagaacgccaatgggtactctgctgtggagaacacatcgcatggctgataggcgaacgaacagacaaccgctttcgtattgatgaaacgactaagcgcgtcgtgatttacaaaatagtctgaggcaacttctgtttcttgaaacaatctgataacaaagctgcaaaaggagtttcatacacccttgctttcctaacgcaagcttttacacaagcgcaacatttgatacatttagcctcatccgtatgtagctcatcccctttcgttatagcccctgccggacaacggaccacacataacccgcaatgggtacacaaatcctcatcttccacccaaggaacgcggggaagcggtgtaccacttttacgtaacttgatgactttcctcaaaaaacggaacaaaggaaagaatggttgactcggacgtttgatagtacgtacatccaccggataaagggtatccatactatcagctgtctgtattttttccatgattttcttcccaaactccgcagcaaaggctaaatccgattcatcaggacgtcccactgcaatcgggtatttgtcggtactatatgaatgttctccaataaaagttgccccggcaattactttaaatccatgaggaatagcaaaagcatccaattccattaaagctttttcataagcgcgatttccgtaaaccactaccaaaacggtaggagtatccactccacggatatactgtaaacgttccattgccaaaggagcgacatgtcctccatacacaggcactacaataatagccaaagaagatgtaggaatcacaatttcatccgcaatctgctgcgtcacattaataggaaaaatattttttatgcccgtcccgtgaacaatcgcctccgcaacttgtttagatgtgtgtgtaggcgaaaaataaattaaatgagcttcatttactgtcatactattttcttttatgtagcaaagatacacttttacgtggaaaaaaatgtttgattgttcatgaaaccaaaaaaaattattatctttgccccgttgaaacattctacgattcaacatatacatccctaattcagaataaaaaacaaaacgtatgctcgcatatctgtagccatgagctgtagtaatgctgtccataattcagcaaaaaaagaaatattaataacttaccatactatatgtataacattatccaattaaacgacaaaaatctgtcggaacttcaagttattgccaaagagttaggcataaaaaaagcagactcatacaaaaaagaagaccttgtttataaaatactcgatgaacaggccattgtaggagctacaaagaaagttgccgcagataagctaaaagaagaacgcaaaaatgaagaacaaaagaaaaagcgttcacgggtagctcctaccaaaaaagaagacaaagtggtttccgcaacaaagagtgaagaggctaacaagacaaaagagaccgctcctgtaaaagctgcaccacaaccttccaagaaagaagaaagtacaaacaaagaaaaagaaactgttgttgtagaagctaaagcggaaaacactgctactcccaagcgtaaagtaggccgtcctcgtaagagctctgatgcagaagagaaaaaagaagtagaaaatgcaaaaccggcagcacccaaagtagtggaacctaaacctgttgttgcagagaaagctactggtgctacggaaaagccagctccggtacaacagcaaacagctgagaagaaagcaaaaaacaaaccagctgcagaagcaaataagcctgttgcagaaacaaataaaccggctactgaacctaaccaacctgttgtagagaaaaaggtaatagataaaccacaaaagaaggctgcacccgttatcgacgaggaaagcaatatcttatccagcgttgacgacgatgattttattccaatcgaagatctgccttctgaaaaaatagagcttcctaccgaattattcggaaaattcgaagctactaaaacagaatcagcacagacagcaccggaacagccatctcatcctcaacagcaacaacaatctcaacagcagcagtcccagcagcaacgtccgcgtattgttcgctcacgcgacaataacaacggtaataacaatgctaacaacaatggaaataatggcaataacgccaataataatttccagcgtaacaacaataaccagaatcaggttcagaacccaaatcaaaatcagaatcagaaccaaaaccaacaacgctcaccgatgccacgtgccgctcagcagaacaatgcgggtgaaaatcttccggtacaacagcagcaggaacgtaaggttattgaacgcgaaaagccttatgaattcgacgatattctcaacggagtaggtgttctggaaattatgcaggatggatacggattcctccgttcttccgactataactacctttcttctccggatgatatttacgtatcacaatctcaaatcaaactatttggtctgaaaaccggtgatgtagtagaaggagttatccgtccacccaaagaaggagaaaaatatttcccattggtaaaggtttcgaagatcaacggacgtgatgcagctttcgttcgcgaccgtgttcctttcgaacatctgacacctcttttcccggatgaaaagttcaaactttgcaaaggcggttattcagactctatgtctgcccgtgtcgtcgatcttttcgctcctatcggtaaaggccagcgtgcattgatcgttgcccagccaaagacaggtaagaccatcttaatgaaagatatcgcaaacgctatcgcagccaaccacccggaagtttacatgattatgctgctgattgacgaacgcccggaagaagtaacagacatggcgcgcagcgttaatgcagaagtaattgcttctactttcgacgaaccggcagaacgccacgtaaaaattgcaggtatcgtattggaaaaggcaaaacgtctggtagaatgtggtcacgacgtagttatcttccttgattctattactcgtctggctcgtgcatacaatacagtatctcctgcatccggtaaagttctttccggtggtgtggatgcaaatgcacttcataaacctaaacgcttcttcggtgctgcccgtaatattgaaaacggtggttcactgactattattgctaccgcattgatcgataccggttctaaaatggacgaagttatcttcgaagaattcaagggtacaggtaacatggagttgcagctcgaccgcaacctgtccaacaaacgcatcttcccggcagtcaacattaccgcatccagcactcgtcgcgacgacctgttgcttgataaaacaacccttgaccgcatgtggatattacgcaaatatcttgccgacatgaatccgatcgaagcaatggactttgttaaagaccgtctggaaaaaaccagagacaacgacgaattcctgatgagcatgaacagctaatcaacagcaaacttataaatgaacggtgaacaaactgcgccataacaagtgcagtttattcaccgttttctttttcggtaacccattttatgacttatcacctgccgtttatcacttatcattcaactcccatcaccgatagttacccctaaccgcttgccacacctttcatttttgtacaaaatactttcatttgcgtccaaaactactacctcgcccttttttacgtttccttttttcctacttttgcttccaaatcaaatattacttaattctaaccagtaatgaaaactatttatccattcatgggattagccctgtgcagcgtgacagcgcaggcccaagaaaagcccaatttcctgattatccagtgcgaccatctgacacaacgcgttgtgggagcttacggacaaacacaaggctgcaccctccctattgacgaagtcgcttcacgaggagttatcttctccaatgcttatgtaggctgccctctcagccaaccctcacgcgctgctttatggagtggcatgatgcctcatcaaaccaatgtacgttccaactccagcgaacctatcaacccacgtattcccgaaaatgtaccgacattaggaagtcttttttctgaaaacggttacgaagccgtacacttcggaaaaacgcatgacatgggttcacttagaggattcaagcataaagaaccagtagccaagccattcactgatccggaattcccggtcaataacgacagcttcctggatgtaggaacatgcgaagacgctgttgcttatctaagtaatccgccggaagaaccattcatctgtatcgcagattttcagaaccctcacaatatctgtggatttgtaggagcgaacgaaggagtacataccgaccgccccattagcggaacccttccggaactaccagccaatttcaatgtagaagactggagcaatatccctaaacctgtacaatacatctgctgcagtcatcgccgcatgacccaggcctctcattggaatgaagagaattaccgtcattacattgctgctttccaacactataccaagatggtttccaagcaagtagacagcgtattgaaagcactttactccactcctgccggaaaaaacacaatcgttattatcatggctgaccatggtgatgggatggcttcacaccgcatggtgaccaaacacatcagcttctacgatgaaatgaccaacgtaccgtttatctttgcaggtcccggcatcaaacaacagaaaaagcccatagaccaagtattgacacagcctacactggatcttctgcctaccctttgtgatttggcaggaattcctgttccggccgaaaaaccgggaatcagccttgcacctatattaaaaggagagaaacagaaaaaaactcacccttatgtcgtttccgaatggcatagcgaatatgaatatgtcgttactcccggacgtatggtacgcggaccgagatacaagtacactcactatctggaaggtaacggagaagagctatatgatatgaaaaaggatccgggagaacgcaagaatctcgccaaagaccctaaatacagtaaagtcctcgccgaacaccgtgccatgcttgatgattacatcgcccgcaccaaagacgattaccggagtttgaaagtagatgccgatccacgatgcagaaaccatactcccggctaccccaaccacgagggccctggggtacgagagatactcaaaagaaaataaattataaaaaagagtgaagatttctttgtaatcttcactctttttagttcttttgcagataaacttacaagcaagcaattcttatatcaggtgaaaaaacacagacgtcatataattgcaatagtcgtaaccgcattaatatcggtcaccttatatgctgcacgtacaaattcagatcgtctttctttattacaacctttacttgaatacaatcatccatttagtccggacgcccctgtcgacagcatcattgcctgggaaaaacttttagaaccggaattacaaaaggaacaacaatacccactcctattccagataaatctgctgaccgttcaagccttaatcacagaaggcaacatcagtctcgccatcaaccaggccaatcagatgtaccagaaagccagagaaatggactatcctttgggaacagcactcgcattacacgccattggaaatacctatttaagttcgtcaacaccacaagttgccatcaaatcgtataaggaagcattagaaatcattcagaaactccctcatgccaaccaatatatcaaaacgatcttgtcccaatttatcctgacgaagctcaactatcaccaaatgacagatatagaagacaatatccgggaactcgaatctgttatcaacaaggatacgaatccccaagacgatttccaccttgtttattgtcaggcattctatcgcatccagatgcatcatcttccggaagcattaaactatatacgacaaaccgaacaaatcagccggcaacaccagtacccatattttcatttaatgattaaatacctgtattcacgctactacactgaatccaaagaatacacgcaggcactaaccacacttgacgaattactttcgcataccaaagcagccaactcatacagatccctgcaagtactgaaagatcgtgcacacatacttgcactaatgggaaacagcaaggaagcatgtgaagcttatgaaatattcaatacgtacaaagactctttggacgcaatgaattatattcgccaaatcaatgaattgcacaccctctaccaaatagataaaaatgaactggacaacttaaacagacagaagacaatcctctactggagctggttcaccatcctatccatagtcatactgattgtatttttcatccttttggttagacgaggaaataaaaaactgcgccaatcacagcaggaactggaaaaagtgaaaaagcaagaagaaaattccatccggacaaagagccttttcctttccaacatgagccatgaaattcgcacgccgctcaatgcgttgtccggcttctcctccatcctgacggaagaatccatcgacaacgagacccggaaacagtgtagcgatattattcagcaaaattcagaactgttactcaagctgattaacgacgtaatcgacttgtccagtctcgaagtaggcaagatgaaattcaaatatgagcgatgtgatgcagtggcaatatgcagaaacgttatcgacatggttgagaaaataaaacaaacgaatgctaacgtccgtttttcgacctctctccattcattagaattgacgacagacaatgcaaggttacaacaattattaatcaaccttctcatcaatgcaaccaaatttactccgcaaggttccatcaccatggaactggaaaaacagacagaagacatagcactgttttccgtgaccgacaccggttgcggtatctctccggagaatcagaataaaatattcaaccgttttgagaaactgaatgaaaatgctcaagggacaggactcggtctgtctatctgccaactcattatcgagcagctgggcggcaaaatatggattgactccaattatgaggaaggagcccgtttcctgttcacacaccccatttaccatgagcaacaaggaaaggaggaagccgaatgaaacaagtcctgctcctgatccttctattatgctgcaccctcaccggaaaagccagcaccgagattgttttggaatccgacagcctgataaaggtgttggaaacattaccgtacgatacgacacggctgaatgttctcaatcaaatcatcagaatagaacaaaacaaccagcaatgtatccaatattcggatgcattaatgaaagaagcattgcaactaggaaatgacaaatatgccggtctggctgcttactaccatattttatactattacaatcgtaataatcaagacagtgtagccaaatggctcaccataatggagcctcatgcccggaaatcagatttatggaattacttctttgatgccaaacgtttccagatagacctgtacacattcaacgaacaatacgaacttgctatcaacgaatctcaaaagatgcaacagcaagcctcccaaatgaatagtaaccggggtagtatggctgcctatcaatgcttgagtaatgcatatatcggcagccagcgctgggataaaggaatagaagcactggaggctgcctaccagctactcactccgacagaaaatccggtggtccgtatctcggtattgtcacagttagtatccgttgtcaaagaaaagaaggataataaaaaactactcaaatatttgcaggaactggaaaacactcttcataaccacattagtgcaagcccatccttaaaagcgggatttgccgatgtatacctgttcaatgaactgttctacagctattattacctgaatacccatcagccgcaacaagcctatgaacatctcgtaaaatctaaagaatatctggacgagaatacttatttcatgtataaagtactctatttcgacacatttgccaaatattaccaggcaattggagcctaccaacaggcatcggattatatcgacacgacactgacgatgttgaagaaagacttcacaagcgactatgccgaacagctactcgaaaaggccagaatatggaaacaggcagggcaaagcggaaaagccatccccctgtatgagcaggcacttgccatcaaagactcgacagccactgtactctcaaacaatcagatggcacagatacaaagcaaatacaatatcgaaaaaacagaactggatcaaaaaagggaaaacaaccggatccagctcacctatctgatctttatatttgttatcctgattctgctttttatctttatggcacgactctttatggtacggaaggcactcaaatacgcggaaaacgaaatccggaaaacaacagaaaacgtgcggaagaccaatgaaataaaaaatcgcttcctgtccaacatgagctataacatccgtaccccactcaacaatgtggtcggtttctcacaactcatagccagcgaacccaatatagacaaggaaataaggcaagaatactcaaacatcatccacaaaagttcggagaagttaatgagacttgtcaatgacgttctcgacttatcccgtttggaagctcagatgatgaagttccagttgcaagactatgatgccactaccctatgcaaggaagcatgcagcatggcgcagatgaggaacgaagaaacaggtatccagattgaattttccagcgaaacggacgcccaaattcataccgatataatgcgactgacacaggccttgattagcgtactggtgtacccacaagaacaccggcaagcacgaatcatccggttcacattaagccagaatgaagacatgctttgtttccggatcactaattcacctttggcagaccatgcattcgtatcacaggaaaccatcatccggcatgatatcaacctgttgttactaaaacatttcggaggaaactatctcgtcaacgataaaactcccgaaggtccggaaattgttttcatctaccccatcgtttccgaatcgaaataaagcactatctttgcaaagtgtaaacttaaacacttaattatgtacaccaacaaacagatttggagtgtcagttatccgatactactaagcttgctggcacaaaatgtcatcaatgtcaccgacacagcattcctcggacacgtgagtgaagtagcccttggagcatcagctatgggcgggttattctatatatgcgtattcaccatcgcattcggattcagtaccggttcgcagatagtcatcgcacgacgcaatggcgaaggacgctattcggatgtcggtcccgtcatgattcaaggaatcatgttcctgttcgtcatggccctgctgctattcggattcaccaaagcattcggcggaaacatcatgcgtttgctggtttcttcagaatccatctacgaaggaacaatggagtttctgaactggcgtatttacggattctttttctcttttatcaatgtcatgttccgggcattgtacatcggcattacacgcactaaagtgctaaccatcaatgctattgtcatggcattaactaatgtcgtactggactatgcattaattttcggaaagttcggtttgccggaaatgggtatcaaaggggctgctattgcttccgtattggcagaagcctcctccattctctttttcgtcatctatacgtatgccacggtcgatttaaagaaatacggtatgaaccgcctgcgcacattcgacccagcattgctgatgcggattcttagtatctcctgcttcaccatgctgcaatatttcctgtcgatggctacctggttcgttttcttcgtagccgtagaacggttgggacaacgggaactggcgattgccaatatcgtccggagtatttatgtcgtattgctgattccggtcaacgcactggctacgactaccaacagtcttgtcagcaatgctattggtgcaggaggcatccagcacgtgatgccgctcattaataaaattgcgcgtttctcctttttcatcatgctggggttagtagcggtatcggcactgtttccgcaattcctgctctccatttacactagtgaagctgcgctcattacggaatccgtaccctcggtatatgtaatttgttgcgccatgcttatcgcatccgtagccaacgtggtgtttaacggtatctccggaacaggaaatacacaggcagccctgttgctcgaaacgattacaattatcatctacggatcatacatcattttcatcggaatgtggctgaaagcaccgatcgaaatttgctttacgattgagattgtgtattatagcttgctgttgataacaagttatatttacctcaaaaaagcaaaatggcagaataaaaagatataaatacaagagatttttgtacatttgcaagctcaaataaagagtagacggaaaagtccctctttcgcccaagtaaattgtaattagtaattcgtaattaaataactatgttcgataatttaagtgaaagactagaacggtcattcaagattctgaaaggtgaaggcaaaatcaccgaaatcaacgtggcggagacgctgaaagacgtacgtaaagcacttctcgacgccgacgtaaactacaaggtggcaaagaatttcacggatacagtgaaagaaaaagctcttggccagaacgtgcttacggctgtgaagccaagccagttgatggtgaaaatcgtacatgatgaacttacgcagttgatgggtggagagacagccgagatcaatatcgacgcccgtccggcagtcatcctgatgtcaggtttgcaaggttcgggtaagaccaccttctccggtaagttggcacggatgctgaaaaccaagaaaaaccgtaagccattactggttgcttgtgacgtttaccgtccggcagctatcgaacagttgcgcgtattggcagaacaaatcgaagtaccgatgtactgcgaactggacagcaagaatccggtagaaatcgcacaacacgctattcaggaagctaaagccaaaggatatgacctcgttatcgtcgatacagccggacgtctggcagtagacgaacagatgatgaacgagatcgccgctatcaaagaagcaatcaacccgaacgaaattctgttcgtggtagactccatgaccggtcaggatgctgtaaacacggctaaagaattcaacgaacgtctggacttcaacggtgtggtactgaccaaacttgatggtgatacccgcggtggtgcggctctttctatccgttcggtagtgaacaaaccgatcaaatttgttggtacaggtgaaaagttggaagcaatcgaccaattccaccctgcccgtatggccgaccgtattctcggtatgggtgacatcgtttcattggtagaacgtgcacaggaacaatatgatgaagaagaggctaaacgtttacagaagaaaatagccaagaaccaattcgacttcaatgacttccttagccagattgcacaaatcaagaaaatgggtaatctgaaagaccttgcctccatgattccgggagtaggaaaggcaatcaaagatattgatattgacgacaatgctttcaaaagcatcgaagctatcatttactccatgactccggcagaacgttccaacccggaaatactgaacggatcacgtcgtacacgtatcgccaaaggtagcggaacgactattcaggaagtaaaccgcctgctgaaacagttcgaccagactcgcaaaatgatgaagatggtaactagcagcaagatgggtaagatgatgcctaaaatgaaaagataatcattcaatagatccaaactgattataacaaaaaaagaggaagtttcgacttcctctttttttgtatccggaagcctacggtagaaagtagtttctccactaacaaactgataatatactgctcatctcctgacaaaaattccaatccttttggagagttcagttatttattttacttttgcccatcaccaataaatactctgaaaatatgactctgatagacggaaaagccatttccgaacaagtgaaacaagagattgcagccgaagtagccgaaattgtggctcgtggcggaaaacgcccgcatctggcggctatccttgttggacacgatggtggtagcgaaacgtatgtagctgccaaagtaaaagcctgtgaagcatgtggattcaagtcctccctcatccgttatgaaagtgatgtgaccgaagaagaactgcttgccaaagtacgcgaactgaatgaagacgacgatgtagacggctttatcgtacaacttcccttacctaaacatatctccgaacagaaagtaatcgaaacgattgattaccgtaaagatgtagacggcttccacccgatcaacgtaggccgtatgtccatcggacttccgtgctatgtatccgctactcccaacggtatcctcgaattgttgaaacgttacgaaatagagacttccggcaaaaaatgtgttgtactcggacgtagcaatatcgtcggcaaaccgatggctgccctgatgatgcagaaagcctatccgggcgatgccacggtaacagtatgccacagccgcagcaaagacctgataaaagaatgtcaggaagctgatattatcatcgctgccctgggacaacccaactttgtaaaagccgaaatggtgaaagaaggtgcggtagttatcgatgtaggtactacgcgtatgccggatgcaaccaagaaatcaggcttcaaactgactggtgacgtgaagtttgacgaagttgccccaaaatgttcctttatcactcccgtaccgggcggtgttggaccgatgacgattgtatcgttaatgaaaaatacactcttagctggcaagaaagccatttatcaatgaaacatagcttgtttctgatgattttacttctctctttgtcctgcacctcccggtcgcaggcaaagagagattctatcatcgataccctgtcggacagcctttccgcaaccgacagtatttcccccactgataccctacgactccttttcgtaggtgacctcatgcagcatcaaggacaaatcaacgctgcacgaacctcaaccggctatgattactccacctgttttacgtacgttaaagaagaaatagggagagccgatctcgctatcgccaatctggaagttacgttaggaggcaaaccctacaaaggttatcctgctttcagcgcaccggacgaatttctgaccgcaattcatgacgcaggtttcaatgttttagtgactgccaacaatcatagtctcgaccgtggcaaatccggactggagcgtaccattcaacttatcgactcgttgaaaattccacatgcaggcacgtatatcaacactgaagaacgcgataagaaatatcctcttttattggaaaagaacgggttccgcatcgccctgctcaactatacgtatggcacaaacggtatccccgttactcctcccaatatcgtgaactatattgatacaacagttatcgccaaagatattgaagagagcaaagcaatgaaaccggacgcaatcatagcttgtatgcattggggaatcgaataccagtcgctcccggacaaagagcagaaattccttgctgactggctgattcaaaaaggagtaaatcatgtcatcggctcccatcctcacgtagttcaacccatcgaagttcgcacagacagcgtgacaaacgacaaacatctcgtagtctattcactgggaaattatatttccaatatgtccgcccgccgcaccgatggtggactgatggtaagaatggaattagtaaaagacagcacagtccgtctcaataattgcgagtatagtttagtctggacagcccgccccattcagtccggaaaaaaaaatcatcaattactccccgtcaatttcccaattgactcaattcctttacaagcacgtaactctctgaaaatcttcacgaatgacgcgcgaacccttttcaacaagcacaatcagggaataaaagaatatacttttttcgaaaaaaaatagcagaatcttttggagattagaagataatatctatctttgcaccgcgttagagaaacgcagacatggtggatgtagttcagttggttagagcgtcagattgtggttctgaatgtcgccggttcgagtccggtcttccacccttaggtaagtccttgtaagttagaaacttatgaggactttttctttggtagtggggtatcattcaggtgctaaatctggcataaaataacctgtttaagtccaattgttggctaattgttggtggaaaaatacaatacctaacatgctgacattcaaggtagaaatcagaaagaatgaaatgaaagttggtggaactttcaatgtgaagattagagtaacctataacagagaggttaagaggttggctactcatatctttgtaagaacagaagacctgactaaggacttcaagttaaagaatccaaagtacatcaaggaagctgacaaattggtcagatactatgaagagttatgcatggggcttccattagaggcttccaatttaaccttaagtgatgtacttgattatatccagaaagagaaggaaaagaatactcctattgactttatccagttctgcaaagactggttaacaactacagaggtcaaaggtaagaggaattatcaaactacccttaataccttcattgccttcttaggaaaggataaactgaataccaaccaagttaccaagttgttaatgatggagttcatggaataccttcacaagaaaagggctaaacaggtggcagaactccagaggaaaggcaagagaataccttccaatagaatggtatctttatacatggggagtatcaggcatctattcaatgaagccaagaagaagtataatgactatgacaggaatgtcattagaataccaaattcaccttttgagaatttggagataccaaagcaagaagcaactaggaagagagcattatcagtagagttaatcaagaagatatgggaactgccttatatcatcaataccaatggcagggaaaggttgtgcccttttaacttagccaaggattgtttcattctctccttctgcctaatagggatgaactctgctgacttgtacaactgtactgaaatggaaggtggttcaattacttattacaggactaagactacagacaggagacttgacaaggctaagatgaaagtagatgttcttcctatcctgttacctttaatgaagaaatatgaagattacacccagaagaaggtgttctgcttctatcacctctattctactttcaagaacttcaacagagccatcaatcttgggctaaagcagattggcaagatactaaaaattgatgatttggagtactatgctgcaaggcactcatgggctacattagctgttaacaaggtaggcattgataagtacactgttcatgctgcattgaatcatattgatgaggctatgagagttactgacatatacattgaaagggacttcaagatagagaatgaagctaacaagaaggtggttgagtatgtatttagcaaccataatgagtagtcttgtccaaaagtgaaataagtttaacacaaaagaacctctgtaattgattgaattatggaggctctttagtatatttgttcacttacaatctatatactaactacaaactaagtgagatatgagcaaagaagatgaactggcaaaagaacaagcagaagtagtacctaatacctatggtgacttacatgatgcacctgtagaatatattggagaaggagcaggcattaaaaccatacctcaagacacagtaataactagtttggataacttactatttggcagaccaccagaagtaataagagaagaagttggtgactccttctggaatctggctgacttcatagataaaatgcctcatggcattgtagacaaacagatacccggcattggagctactacacttgagataaactcaaagagaaactcaatcatagtctttcctactaaggctctggcttatggtaaacactcaaagcatcctaatacattatatgtaggtagtgagattaaaggtgaaaaggtcactaatcagcagattgaggaatacttggctaaagatggatacaagaaacttctagtagttgcagacagtctaggtagactattaggtatcataggaaaaaactacaaggactacttccttatgattgatgaggttgatgttctccagactgacaacaactttagacctcaattggagaatgtgattgactactaccttatgttcccatcaaagaacagatgtatggtaacagctactatgaaggagttcagcaatccacacttaaagactgaatgtagatttcctataacatggcaatacaatacccatagaaatatagacttactacatacagacaatatcacacaggctgtcatagaaaaggttatctctcatcctacagagaagatattcattgcctataactccatactccagataaggaatattatagcatcactagatgaagaaaccagaaaggaatgtgctatcctatgtagtgaggcatccataaaggaagcaggagaatactttgcacccaaattaggagacaatgataccttacctgctaggattaactttgccacctgttgctacttcactggtatagatatagaggatagttaccatctaatcactgtatcagatgtaagaagaagccactcaatgttaaccttagataggatgacacaaatacatggtagatgcagaaaggtcaatgggatacttagtgaaactatcatatataataccttaggatatgtatcaataatggaaagtatggatagctatacagtcaccctcttaaataaagctaagaaggtgctcaaagtaatagaatcagcagataatatcatgcaaggtgaccataccctaactgatctgtttgcaatggtcaaagaagccataagagagaaagcacaagaaagaattgcgggaaatgagttaattaacttgactagaaaggatatatatggaaaggatgtacctgcctacctcaacatagactacatcattgaaagaaccgagttatatgcctcatacttcatgcctgaaacactgaaagaagtactaagtaaacaggttaaaatcattagctacaaatccctgaagtatgatgtatccccagagcaaagtagcatagaaaaggctaataaggatgcacagaacaaactaacagacagcaatatccaagatgccataaaatacatcaaaacattatcaaccacaggacagttgaatgataataccttgtactcatatactagacattgcagaagtaaaactaagatattcttagagagattcatcaagctatataggtatgttgaccttgatagtctgctacatcaactatgggaaattagaacaagtaacagtatagcttataagaacctcaataatacagtcatgtactgggcactagatgaagagcatcctttcaagattgctataagaagaagtttcaccttaaataagagctattcagcaagtgagatacaaaagatattagctcctatagttcagtatcatctacacaagatactgaaacctagaaaatatgtagccctattgagaagcatatatgccactgacaggacatctaggaataagtacaccatcagagaagagaatccaagaggatttaaagaacatactggcaggatagctactaaggaaaataatttgttaaagttatttatttaataaatttcccatcataatggaagtagttcttatatttgtagacttatataaatgttatgaataatctatttagttttagcatattaagtggcataagagtttctcctagaagaagagctagtattgcctttatggctcttgcaggtaaagggcacagaagaaatatagtattacctgtggattttgaccttgatgtccatttagccttgtatcccctagagaaatatgggtttaattccaacttaaggttttctaaagataagatatactatttccttgctttgctatctactatacctgctagaaataaagacctgatagatgaagatggttgggttcctattactattagttatataaggaagaatatcagagacattatatcttacaaggattacttagtgaatacaggtgtccttgagtgttatgctacatatatacctggagtaaaatctatgcagtatagatggaatgaacagtacattcagtcaggttttcatatttgtaatgtcacttgtagccatgaagaggatgtttactttatccaagaagagaatgatgaaaagtttattgaactaccttacttatatcactggtatgaagagaaaaggttatctattaaccctatagtaagtcaatattctgatggcattctgcaatataagatggaggacaaaggaaggtggaacaagaataagaatactaataaattgaaacatccccttgtgcagtatatggcagctctaataaacataaataaaatagagaatcataggtatgaagtacatatagacagcacagtccatagattacattctgtaatcaccaatatagaaaaggactataggaatttcctcacatataatgaacaagaactagtcagcattgatataagtaatagccaaccttacttagcctgtgtattacttaaacctgaattctggagtataagaaatgaactctcactaagtttatattcattaccagaggatattcagagagctatgactactgttgctatacccttgaaggtagaaggattcttccaaacatgcagtgaagaagattttgcacaataccttgatatagcttctagtggtaatatgtatgagacagttgcagaagtatgtcaacatagtctacataaatctattgatagagatgaggctaaagtgcttatgttttacttgttcttctccagtaatcaagggcagcatgatgatgcaaccattaaccaaatgaagaagatatttagcacagaattattccctaaagtagctgaactatttaagattatcaagcatagatataaggatattgctattgataaacagcataataggttatcttgtttattgcaatcaatagagagtgaaatcattctccacagatgctgtaaaagaatatgggaagaaggcaatcctcaagttcctgtatttactatccatgactccattgctacaactactgaacatgttgaatgggtgaaaggtatcatgcaagaggagttaactaatgcaataggagtatcaccaagcttaactattgaacattggaacttaagtaaagtgaagcaccctaatatacttcaaagagtagtacaagagtaatcataaaagtgaaggagtcccaatcccccctgttttcacaccagaaggcagggactttctatatctgtacataactaatatatagcactccctactgtcatctgatatactgtctccctgatatttttaatttttattttcaatttctgcaaacttgatatctacaagtgtactctaagtcacattttcacccaccccagaccttaagagtgggatatcccccctgtacatcttggggattattgaatttacattgtgaactcattacagttagctcattaccccaccatagtaactgaatcaacagcagcagaatggtctgtctgcacaacaataaaattacaagattatggaaaagttaaagttcttagagacagtgacagtgaatgagttcaaggctcaaaagggtgtaaacaagattgaggttaagcagaatcctcatacaggtaagtgcttctttgtttatggctgtgaaactggtgcagttagtgacaagttccttaatggagaggttaccaatcctgttatctcccaagtatgttcacctgatacaggtgacatgttttatatgctgcatcagagaggtgaaggtggagctatgacactggcaactctatgatgggtatcaatgttgacctcaaggaggcaagtttattaggacttgcttccttttttctttatagactgtgtataacaattaatcctattcagatatgttgaacttaagagtttcatccaagaagcagactaagattaagcttgctctacaaggctgtgcaggttcaggtaagacctattcagcattgcttttagcttatggtttatgcaatgactggactaagatagccatcattgacagtgaacatggaagtgctgacctttatgctcacttaggtgcttataatgtattaagtctaagtgagaattttacacctgaaacttatgtagaagccattggtatatgtgaaggtgcaggtatggaagttatcataattgacagcatttcacagtgttgggataacttgcttgaataccatgcaggattacaaggtaacagcttcactaattggcagaaggtgacacccagaatcaatgctttcatgcagaaaatattgcagtctgaaagccatattatatgcactatgagatgcaaacaggactatgttctaagtgagaagaatggcaagatgataccagagaaagtaggacttaaagctgtcatgagagatggtatagactatgagtttaccatagtctttgacatcaacatgaagcaccaaactattgcatctaaagacaggacaaacctgttcattggtaagcctgactttaccattacacctgctacaggtcagacaatacttgactggtgtaatgatggtgtcaatttggagatgataagaagtaagattaacagcagtaagaccattgaagaactgactgctatttaccatcaatatcctgaatggtatcagcaattaacatcagactttatgcagaagaaagcagcacttcaggtacaaaagaatcaaccaactattaactatacccctaattacattagatatggaaacaatgcagttgcagccagtcagagctaatctgatataccctaatagaaataaggtagataatccttatattcaaacagttgagccaatagaagtcatcaacacaggtattgcatcaacaaatcctgtggaagctgaaccaataagcaccagagaaggctataagttaccttttattgaggctaatacaaaggaagtaaccatgcagtacctcaaggaagaatgtatcacacctgtattctctaaagataatgaggttactatatcacactccaatttcattgaaactgtatgggatgcagctaataaggtgttctccaatgagagaatagaagaacctgccatcagggtaagccatgttatcaaaggcaggataccggaagctattcataaaccagtgaatcaactactggaatctgataaaaccatttactttgagagaatgatgttctgttttgagatacctaccatatatgaggatattgcaggtaacagactgaatttaaccataggtggagttagagcttataaccatgagaacctctacagcaagaagggtgtagagaagttcaaggtattcattggctttaaaaacatggtatgttgtaacatgtgtgtatcaacagatggttacaggtcagaattaaaggttatgagtacaactgaactattcaatgcagtgatgaggctgttccaagagtacaatatagccaagcacttgtattatatgtcagcttataaggatacttatatgagagagtcccaatttgcccagttcttaggcagatgcagattatatcagttcttgcctgtagaccagaagaagaagttaccacagatgctaatgactgatacccagataggattagttgccaaagcatattacaatgatgataactttagcactcttctggacagcagggaaatcagcatgtggaatgtgtacaacttattaactggagctaataaaagtagctacattgataacttcttggacaggtcacttaatgccacccaattggcagaaggacttaataaggctttatatggtgaaagtgaatatagttggttcattaattagtgcatcttatggacagtataatgaatgtagcagaggttcaattgagctataaaagcaatgtcaaatcatcaactagatacaagataaatagctcacaggatgcctatgaactattggcaaagtacttccctgatgacacaatagaatacaaggaaagctttaaagtagtactacttaatcagtctaacaaagtactgggtatagtacctatttcagaaggtggaatctccgcaacttatgtagatgtaaggctgatattacaagctgccttgctggctaatgcaacacaggtaatattggcacataatcacccttctggaagcatgaaacccagtactctggatgatgctttgactgaaaaagtaaggaaggtggctgaactcatggaaattcatgtagcagaccatataatcttaagtccagagaaggaatattactcctatcatgatgaaggtagattataaatacttaaccttctaaggtctacattaccctaccttctattaaacctatccccctctgctgttattataccattatgatgggaaattctgcaatcccactttgttggtataatatattaataagtaagcaggatgaattgtatccacttctatttcttattattaagagaagtgaatacattatcaataacagatggtatttcattgtaaagtagagagaagtgctgctataataacttaatcacttgaggttcggtgaagtatgtagacatgaattatagcaatagtcagtaagttagactaaattaaatattgattgagttatgtgtgagattatcttaattctagtggggtttgtcctcaccagtatgatacttaaggattaagaggttatatgtctcttactatgtgttttattgttgttgatagccctagttcttcatggactggggctttaactagtgtatatatgacagcattagatatgatattacagtggttcatattgatagctactggtgctctatttatcaattgggcatacagaaagtgaataattaagcctacctttgtgcaataaggatataagcctacacctatggtactaatatgacttgaaacctatcaaattatgatagtcagatgatgaagtatgactagaaagttctatctttgtagctgtatcaactaaatgacaactaatgaaatagaagtttaacaagacatattagataaagaagtgtttgcttcttacttgtgacagtcctaaaattaccaccttgaagactaacaatcacagcagtaagtagtggatactcataccattaggtgtgggcttcccttatattgtgtgattgtaagcgtgtggtaatgctttggactcccaataaggttaggctcacaccttctttttgtagtatggttacaaaaggaaaacaatatgataatactctctaaaacatttcaactcttctttatctcctctgatggatatcccagaggcaggtatatacctacaccagacttaggacttccaaattcaagtgaagttgttaatggtatgctcatagcaataccattaatattaataggatttctaatattaaaatcatccaatgagaagttaggttgcttagggtcaataatgcttataggaggcataatttgtttactaccattactcgcttggatagcctctattgcttcatctttattatctataggagtaatactgatggtagtactggcagtaatatgtttaatatacaacctaattaacaaaaagaaagaatgatgaaaagtacatatttaatattgttggttatattaatctcttcatgtcaagtcaattccaagagacaagatgaaggacatcaaagtagtagtaatctcaaagacatatcctattatcaagaaagaggttatcagatatttcaagagtatggttttgccattaaagctccttgtctgctagaagatatatcacagcaagtttctggggaatggttattaaactatgggggtatagcaaacaaagaaagtcctgaaaaaagaactttttaccaattagcagtaaatagacttcctgtaggatataaagatataccagcagataaactgaaaagtgctattgatagtaagattagagatacaatgaaaaacttaaagaactgcaaatccatcttatttggttatgaagaatatcaaggatatgtaggagaatgtataactaaaggttatacccagaaaggagttgtatttttaaaagataattatattatttgtttaactgtaattaccaatgataatcttgaagagaaattcaacaaatttactaactctttcaagactatcaaggagaaagaacaaatgctaattgatagtattaatgctggtaatcctataaaatcccatgataatcttattaaaggagcaaaatctaaagatttcaaaaagggagttattcagcacagtctaaataccaagtggagtgaatttgctgataggagttattactcatatatcaagactttgaagtctggaatgaagttgtacagggcagaagctactaacatgatgatggaagtatatgtattaaaaggatatatcaaaattcagtcttccaatatcatattacatgataagactagtgaaacattgaagtcaatggatgcttggctaatgtcctgcaatcctcttactgtcattggggacatatccagtactaaggagtacaactttcatgactatgatattatgttgagaaagttaggcacagatggaatacattatatgatttcaagcaacagtgataccaacaatcagagtatcaaagctacaactgatccttctctaaacaagcaatactctaatgagtacttctctataaagtaccctaccacatggcagatagttcaggatgacaaccaagtaactggtaatacaactgtctctgttcagattatggagaaattgaagaatgaccatgactttagacctaatattaacatcattgtttccaaaaagaaatggagtgaacctacctcttatttagcccagaacacaatagcccaaaataagcaaataatggacagttatcacctactagaacagaatgatgacatctacataaacaactgtcaaggaagtgtgatagactacacctttaacattcaagggtacaagttgcatggcatacaatacatagtaaagaagaaggataacacaacctttatcattactgcaacaacagatgcagcaaggcacagtaaacaaaaggtaattgcaaatacaatgattaactcacttaaaatcaagtaatatgaacaaagaagaactacaaacattaaccattgaacagctcaatggaatgacagaacaggcactaaaggctgtagctgatgaagtactggaaaagctaaatgagactgaaatagagaaacttccccttgagatcaagaagaagctcaacttgaaaaggaaaagcatctggtgcagtgctgaactatggatttcattaatacttggagcactggctatgagtataatgcaatctatcatggggaaataataacatcaacaattaatatatacatatatgagaatacttactcttgttctatctctgttgattttcaatctcaatatacaggctcaaagtaaagaagaacctaaaaataacttaaataaaaccttagaacaacttcaaataacatttccaaacttacaatactggggaacagataacaatgttgtaagatataaatatgaagataatatactgtttgaattgaagaataatagggttattagtgaatttatgacagttgaaggagaaggtaattatccctatgactggtatactgctatgactaatgctttttataaaacaaactacacccacattttaaagggtgataatgggaatacttttatatattcttacttttcagtctatattagttattctgacagaagcaatacagctagtatcatgtatgatttattgcctaaatataaatagaactcatggatttatcttacgggatatgtaaaactaaactccctattatcctagttgaaatagaagataagtatttatgttttatcttggatactggaagcacctgtagtctgatagacagtactgtagtagaatatttcaaggatatagtagaaccagttggtgactattgtatcagtggaatagaaggaactaagcacaaggtagatatgattactctgccttttaactttgaaggtcagatatataagcccaagttctgtgtgaaacctctacttgatgcctttaaaggtattgaggatgaaagtggaatacaagtacaaggactacttggcactgactttctactagagaacaagtgggttattaactttgagaaattagagcttatatattaagaatcaacaaagcattatgaaaaaagtatttttagtgttagctgtagttctactatgtgtaggatgcagcaaaagtgatgaaaatgaacctttaacagggtatccagagatgtctgaccctgatgatgtatgtactgctatggatgatatagagtttatgaagtactgctatgaacactttgatgtaaacaaagatggcaaggtatctcctgttgaggctcaagcagtcacaactattggttttggtaattcaaccaccagtataagtggtatattaactaaagtaaagtcattaaaaggaatacaacatttcacaaatttaacatctctagaatgtaactgttgtttcatacaatcattagatgtgtctaagaacctaaaattaacctcattaaaatgcaataactgtggattaaaagatttagatgtatctaagaataaaaacctaactcatctagaatgtggtaacttactcattattgatggtaataataatgatataattgatgaggaggatcttgaatatatgaacacaattagggagttaaatctgtctaataacaaaagtttacagcaactaatctttaaaaatttatggtttatttctagcattgatttatcaaataaccaagaattaaagaaattagattgtgagcaagcatcaatttcaacattaaatatatctaagtgtcccaaattagttgaattaaactgtggactaacagacatacatatattagatatatcgaataattttgagttggaaaacataaattgtaattatagcaaaattacaagcttagatatatctaacaatcaaaagcttaaatcactgagttgcagctatacggcatttagtactttggatttatcaaatagacaccaaatacaaaaagtatatagctatgactgtactttatctagtataactatgaaaagaagccaagatagttacaaaatatttggatatgtaagtgtaggcaatgtctactatattgactagaaggtatctaaagttaaatcatatagggataattgcagtctcttattaatttcattactaacagttcccatatgtaagaagagaaaggcaaatgaagtatttcaagtaagttactttgaatacttgcaaccctgaccttgttaaagctctgatagggtatttacactcatgcctacttataataagatgagtatctattgaatgacactttaaactaattaagttatgaaacagaaggaagaaacttagcacatctaagtgctattggtagcatgatactagcataatagtaatgcaagaaaagctcaactacaacataaagccagagattgtttggagaaccaaacatattcactatatttgcatcaatcattaaaatcaaaagtaatgaagaaagcaccttagagtttaacagtgattagcaggtaaacctgttacactgacaccatataaaatggtggagaagctagccaaattagtagcaatactatcatgttgactaatagttgactaatgagctagcaaggagatatttaacttgctgacagttgagaccactataaggctactcgttaaagattgtggttctgaatgtcgccggttcgagtccggtcttccacccagaaaaaacccttgtaagttaagtacttatgagggttttctttttgttggtagaatatcattcaagtgctaaagtttttcctactataaagttgaaaaacataaaaacatctgccacctgcaacgaaaagcgtgtaatacactagttaataaatagttagaacgtggcagatacctgtggcagataggttgcagataaagtatctgcaacacgttatataatcaaagaaaaagccttgattccttgatgcaaagctatgggataattgggatcactctatggagaatttgtggtgtctacggggaaacgacagtatccttacgtagaaactgtagtgtcctgtagtgtactgaataagttgacacttctcaaattcgaaattcacatggaagaattaaaaaagaagtacactccttacacagaatctgaacgaatgtcttatattcgtgagtatttatcgacttccgaaacgaagtatcagtttgctaagcgtaccggtatttgccgacgtctgctgattctttggctcgaaaagtatcatataaatgataaagttatgaatacagaacagccctctttaagcaaagcctctgatgagtctctcaatgaactggaaaaagaactcgctgcattgcgtgccgaaaaccgcaaacttcagcgtgcccttcaggaggaaagtcttcgtcatgaagcttgtgaggaattgattaatcttgcggagtccacctatcacatcaaggttcgaaaaaactccgatgccaagtaatcgacaccttgtcacaggggaactctgcccgtcatatgcgcggcagtctgcagttcctctgtgattacttcggcataaccagacaaggttattataagcatgtcaacagaaaaatggaaatagatatcctcacatcaagcattgtactgtattgtactgagttacgtaagcttatgcctaaggctggtatgcgtgaactctatgcatgctgcctccgcaagtttggtgtcaggatggtcattgggcgtgatcaatgctataatatttttcgtgctaatggcctgtgtcaacgtgtcaggcatgtgagaccaaagacaacaaattccaatcataattattacatttatccggacttgctgaatgtcactcctaaatttgtagctgacacattcggttcaatggttgtagcggacataacctatgttgccacgtgccagggatgggcttacctgtctcttcttaccgatgcgggcagtcgggccatagtcggatatgcactgtgcaaaacacttgaagcggaaggtcccttaaaggcacttaggatggctatggacttttacaacagatacaatgttgatttgagtagtctcatacaccattctgaccggggagtgcaatactgctcaaaactgtatgtgggcatgctcaagaaacatcatatcaatattagtatgactcagtgtggagatccgctacataatgccctggctgaacggatgaataacacgatcaagaatgggtggctgtttgactgcgaagatgatagctttgaacagttggataaacgtatagccgatgccatatatgcatacaattatcttcgaccccatcaaggcatacaaatgaaaacaccgatggaatatattcgtaacggcaggggaaaggtagttgaagtcccgctcgtcgggacgggtgctcccgcccctattcttatggattacgcaagcgaattttgataatttctcgaaaaaaaagcatccgtcctaattacagcgaacataatcgtaactaatttcgctctaactgcattcagaaccgacatcttattttttccctcttcgacctttctgtcataatatttcttcaatggactatttttcacttgtgaaacagatagtgccgccatatgtagcaaatgcttgatgctcttgtcagccctattagatactctatttttagaacgttggctacttcctgacacatagacgaacggaacaactcctgcatgacagcaaaacttcctgggatcagtaaaagaagtgaaagcatctgtttccatgatcatcttcagtgcaacacgttccccaactccatccacagacatgagtaaatccatttgatgagcaatgacaggtgcctgatttataagttcttttatttcaaggtctatttgtgctatgtaatccgtaaatgtattgataatcccttcaactctattgcatttagcaatatatattgagtgttccatatagtctacctgatcttttagctgggattgatatttagccctatctgcaacaagcatactgcgttctgttgataagtttttgagtttttgtattataagctctgatgcggtatacggttgtaggcaatcattatatctttctgcatacattgctattcggcaggcatctattttatcatttttgccacgaggtattccatgacaatattttattttagctgcatcttccaaacataagtagactcctatactttttgttgcacagaccaaaggataggtatattgccctgtatgttccgcacagacaaccaaactgtcctcagagaggaaaaatttctcaaacgttcttgttaaccaagatttaatagaggatagatcattaggaataacatcataaaggatgtccttaccgttactccttaaacataaatccaattttttcttactcacatcaactcctaaataaaaaactttcatacttttgtttttgaacattaaacaaaaaagaaaggacctgaacttgacctaataaccttaaacaggtttactgaaattcttatatgggtttgagttcaaggaaggagcaaaaggaccgaatagggacttagacttgacttctattgccgctgatggttttccttttgctttcctttcaatatcaattcaaagataaatattttgatgctgcaaatctaaggttgccgctagggcgatccccaagcgaagagtttttgttgtttaatgaaagtttacagcccgaagtcttgcacttataagagaagatacataattttgcaaaatatcttaaatgacaacttatacaggaattacaaagggacaagtaaacttatttaggttttaaaaaatattgagtaaactaacttaggtataacaagcgaagttgtcaactaaatccagtacagtacagtcgccttagaaactctcgtttcctgccgtggaaactgtaatttctaatgcaggaaacgacagttccccgcctggaaacgggaagtcaatgtatacaataaacttttgccctcctggagaattagcttatgtaaggtttatactgtgttgcagatactttatctgcaacctatctgccgcaggtatctgcaacgctccaactatttatcaactagtacattacacgtttttcgttgcaggtggcagatgttttcatgttttttcaactttatggtaggaggattacgcatcaaaattagggttacaaccataagtcataaaacaaattcacctctgtgttctccgtgtcctctgtggtgaaaagaatcaaaaccgtgcaagaatgaatctattttagattttcatcggtagaattataaccttccggctgtttactattcttgcagccggacaaaaacaatgcacttcctaaaaaaataaaatgattctacccattattatttcaatttaaacgtttacttcattcctgtatttctcaaattctggtatgtccggcaactcctctttttccatgtatagttgtatgaagcgtgcaaaacgcctggcttcatctatatcgcctggcattaaggaaactccacttaacaggctaggtgaattggaattggaaattattatacttgtcacaacccccaacgaaccacgccccatgtaataacgaatcgtgagttcagcctgactataaggtatcgtttcttttttatgcagcagaagtcgtcctggtatagttacagttctggaaacacgatcaaaaacaatccgctgccaaggttgtagaatggcacttattcctagtgccaggataagcaagtacaactcaagaagcagtaatgtacttccataatcttcagttgcaagttttgaaggagttaaaccgagataaaccatagctaaaaatataacaagccagatcagaaaaaacaatactctcaccgatatgccgtcattatcaataacaatctgtttgtcatcacaccggcttaaatattcaggctctaccaaagtttccgaagaatccaacaaccattgcgtatttcccgtactttcgccatttttcagaggtatccggatgatcagattccgggcggctttaaacaagatgtacataaataggtaaatcccaccgttaatggctatcaatccaagtatgatgttggagaaggtattacgtatatctgacagcatgacgaatataagtaataagaagaaagatataaatgttccccacaacatgatatgggatttgcatatacgccacctttcctttctcctttcctttctccactcaacctctctacgcttgacatcggcaatgatttcacgcctcgattgcttgttgctctttttttttcgtttcttcatgtcacctgttttcctgtcatagtttgtttatattgataattcggataactgtaaatacttagtctatccaacattcccattcatcatatcattccagttccgcaccgcttctatggcacattggtagtagcagataccccacacgattaaccaatataccaacacggcagttatcttgaacaaccgtcttttccgtatattattcacttgttttccgatgacgtagaaaaagaataacataatcccccataatacaaatgtctgcactttacattctatcgttatgaatatatcgttagccgctatgtcgaaatcgggtaaagcagatgtataataagaagtgatacgccatcccacgagtagagggataatagcaaacagagtgttttcaattcttttatatggtattgttgctttcatgttttatatatgtggttgcaattctgtatttacgtgtatttttccgaaagtcttttgttcgtcacgtatccggcacagctcccgatgtacttttttatttgcaaatatagaaaaatgttattcacaaaggattatgaatagcacttttttattgttttccagcgagataacacggttatagcttcatcccaccttgcctttccgttgctgtatggactgccgtatgttccgccttagcttgtcgaactgccgcgtggacttgtggcgttcttcggtatgatgaaacgctcgatatggaccgctatgtgtttattttaagaatgtgattgccccaaatcactcccccttaattttcggactgctcccttttttcttttatccgtttttcatttatgtcgcaaaactaaactatcccattatccatttcgcagccttaggaagcactttgtagaataatgcaactatacaccacgatacgataaacacaaataaagctgtcgctggaatacgcatgaatataggtaaatcaattctgtcaattgctaaataacctattcctacagcaaaataatgtaccatatagatgcccagtccacattttgttatattctttaaggctgatatcattaagggagacgttacctttactttttgaattaataaataccaggcaaccgtcattaaaaagacattgggcgaacagtataaaaagaataattccatttgtcgctctgtaatatcaggttgtgaagtcatattcctgaatccataatacgttatggcataaccgacagtaaaaagaatgagagataaaacaacagtctttttcaccgacaacttgtttctgtctttcaaataatagcctaaaagcagataaccgctaaaacctgaaaaataatataaagtgccatagtcattccaagcacaagtacctcctatatagctggatatatattcttggcaataaggcagaaataatgtgataaaccaaacggataagaatattttcatttgtttctctgttgcttgtttcagccatgcagaaaaaaaggcatatacaaatataatcctatcaacatatatatgtaccataaaggaactgtatatgtattgaagttaaaaggaatcataagaatattatgcaagcaactatcccaagtttgacttggagactctcctgcatacgcaaacatttcagacaaaacagaattattcagtcctaaaatacccgtaaaccacggaaacaaattatataataaagaccatacaataaaagggactattacacgaagcatcctttttttataaaattgtccgatttcctgttctaccggtaataataacattcctgtcagcatcacaaacaacggtacgcacggacgcaagaaagctccataaatactcccccataagttatactccggatttaaacgagcttcaggagaaacattgaaagggtctgaacaatggatacagataaccattaaaatggctatcacacgaattaaatcagcccatactatatgattcacatttttcatttggtattcaattttttcaattgcaaagttaggacaatggtatgacattttttttaaactacttaaaaaagcagaataaagtaatgcgaaggaagggaaacgaaacaaccctattatttaatcttgttcctcaaatggcacaacgtaacttgagagatgcctaaaaaagatgcaatataacccaaatttactctttggaagagatccggacgtgtttgcaacaattctatatatcgttcttccgctgacttatacagtcttgaaattaaacgcttttcattcattataaaagcctcttgatgcaaaatccttgaccagttcgctatttctatattagtctgatacagcttttccaaatcttttatcggcacggcatataataccgtattttccaataactgaacaacttcatattcgtacccttgttggttcccataaaaattgttcgtcgaaaaaacgatatctccttctgtactaaaccatgaggtgagttctttgtcgttaattacacaatatgagcgtgctataccttttttaatgaaataaaagtttttatcattctggaaagaggacgttaggatatgttttttgggcaattccaataaagagctatgagcaaacagttcatttatggaactattgctcatgtttgacttggctttaagtgagtttatcgtattatgcatcatttgactttcacaacgcttatttactctttcctgttttttattaagcggctacaaaaatacaaaaatgctcctataataaataaacaagctgcatttttatatatcgcccagattagcatttatggattgccccccttgcctttccgttgttatttcatgaccgggtatccatacttttctgccataatctgccgattttattcgattatcccaatgatattctttatatttgtatagtattcgcactaaaacaaagtacatcatggaaaatgaaaagaaattaacccgttcttccaaccgaatgatcgcaggtgtatgcgccggaatagccgaatatttcggatgggatcctaccttactaagaatagtgtatatattagctacattcttcactgctttcgccggagtaatcatatatataatcctgtggattgtcatgccgggaaaaagaccttcagacggatacgaagaccgtatgaatcaacgtttacattaagataaaaaatcaaaagtatagaccatattttcataccggtatccgatatagataaaagccttcgttcctgtggaagatgataatccgatagaaataagtacattagtatagctccagtccgaactcatctttcagctgcatcaacgcctgattcttttgagccatcatctggaatttctcgacacgtcccacaggacgtattgtttccgttgcctcacttacccgcactgtcatcaccactttgctgtttttcagtctgccacgaagataatcctgcaattcgggaatcaaagctgtaaaatcctttgcagcaaactcattatcaactaccacttcaaaagtcgttgagttattaagcaataccggacggagcatctgcatacgtttagtaagagcatcctgttctttcggcaactgaccggcatattcctgccaatagtaattcaaatcccggtcattgaaaataaaatcctcttccggttgctgcactctgggaacatgagtggtagctgtattctgcgttgcctgatcgcgctgcggattcttaatagacacgcccaaattagacatcttcatcaccggaattttccgttcttccttgacagtcggggcaactcccgctccttgcgacggagcagacgaagccgcaccagaagaagccgatgctcccggttgcactgctgcagatgcttgcggatgccgggcagtagtgccattaacagcctgtgttgttactgaagacggagacgtatgaagggaagcctgctgaacctgggttgcagaagcgacctgcggctgctgagctgcggcaggctgtgtgaatatgggttttatggtcttcgtagggccacgcccaccactcacgtcatccccctcggtggtaagctgtgcaacctgtatcaaggtcagttctaccagcaaacgcttatttttgctgatgcggtaattcaaatcgcactcattacacagcttcatagcccggtacaagaaaggtaacggacatttctgcgcctgttcctgataacgttggcgtatgctcgctcccacttccagtaaaggcaatgtcaccgggtctttcccgaccaacaagtcacggaaatgagacgacaatccggtaataaagtgacttccgtcaaaacctttattcaatatatcattgaaaagcaacaatgcgtcgctcaccttgttttcgaggaagcaatccgtcagacggaaataatattcataatcaagtacgttcagattatcaatcacactcttataggtgatatttcctccggtgaaactaaccacctgatcgaagatagacaatgcatcacgcataccaccgtccgccttcatggctatcacgttcagcgcttccggctctgccgtgattccttctttcgaagcaacatacgacagatgattcaccgtatcttccacgcttatccggttaaagtcataaatctgacaacgtgaaagaatggtaggaagaatcttatgcttctccgtcgtagccagaataaaaatcgcatgacggggaggttcttccagcgtttttaggaacgcattgaaagcagatgccgagagcatgtgcacctcgtcgatgatatataccttatacttaccaatctgtggcgggatacgcacttgctccaccaactggcgaatgtcatccaccgagttattagaagcagcatcgagttcgtgaatattatatgaccgctgttcgttgaaagctacacatgactcacactgattgcaagcctctccgtcagcggtaggcgtcatacaattaatggttttggcaaagatacgcgcgcaagtcgtttttcctaccccgcgcggtccgcaaaacaaataagcatgagccagtttttgggtagcaattgcatttttcagcgtagtagtcaacgcccgctgccccaccaccgattcgaacgtggacggacggtatttacgggctgaaacaatatagttttccatatccgggattctctctgtttttgaaatttcgcttattctgcaaatgtacacaaaaaaagtgataagtaataagggataaagagagaagttttgaagccgaagcgataagtttttaagttattagttttatctttgcagatattaaaaggagaaattatgggtaaactaatcagtatctggagtttcatatgcagacgcaagtacctcattacggtcgttgcatttgctgttatcattggctttctggacgagaacagcctggttcgtcgtttcggatatgaacgggaaatcagccagttgaaagaagagatagaaaagtaccgggcagattacgaagagaacaccaaacgtctcaacgaaataagtaccaatccggacgccatcgaacagatcgcccgtgaaaagtatctgatgaagaaacccaacgaagatatttacgtttttgaagattaaagaatgaaacaattagtacccgcccttttcaccgcaggcgccataatggctctcaccggagcagctgtgtttattaccggatggatatacgctccttacatatatactgttggagccggatgtatcgcattggcacaagtgaacacacccgtcaaaggaaagagcaaaacattgaaacgcctgcgtgttcagcagatattcggtgcactggcacttatcctgaccggagccttcatgtttaccacacgaggcaatgaatggattgcctgcctcacagttgctgccatcctcgaactttacaccgctttccgtattccacaggaagaagaaaaagaaaggttataaaaaaagcccgttcatagcttttcagtcttgaacaggcatcactttttttaattcgataatgttccgtccttttataaagaacggaacagttttatatcatttatttcttcacaggtgaatatcttgcattcaacccgtcaacaatttcttttgtaatattgaaagtgctgtcagcataaagcaggttatcgaaaccagtgttgctgaagatcaggctatatccgtgagtcttattatattctttcaggaaagcgttgatagaatcgcggaactgcaagctattcttgttgttctcttccatcaaaccattctgaagtttgttgctcaactcttgcaaatcttgttccaacttcaccagacggttgtactcttgctgcgctctatcttgtgacaggaaagcattgttttcaactttcttctgaaaatcttgcttttccttgttcaaagaggtagccttctgattcaatgtcatacgaacgttttcgctcttctttaccatcgcctcattcaagtcaatacagaaattgtatttggcaagcagcgtatctatttcaacataggcaattttcattcctgacagttcggcattagcctgagccggagcattggtagtttgattgtcagttttgccagcacattgtgaaaataaaacgataaacgcaagagcagccaaaccgttcatgaggtagttcattctattcataattaataagtattgtttttaataaatttaattcatactatcgttcaaggctttttccaactcgttaatagaaaaacgcggcttcttttgtgcttcgcgatcttgcgactgtgcgcatccgattcctttctgacgcaacgctttattcccactcacgtgaccattcgggaatttcccacccttcgtaaagaatactttcacccctaataataccagggaaatagcaactattaacaaagttatcagtatagtctcaaccatttctattaattttgtgagtgcaaagataggctttaatgagatatgagttcagataagtcaatcaaattaaccatatttagcaatagaagaagcgaaaacaacccttctattcctattataaaatagaaacagcatggaaaaaaaagacttaaagccggctggcgtattcaagtatttcgaagaaatctgccaagtgccacgcccttcgaagaaggaagagaaaatgattgcctacctgaaggcattcggagcaaaacataatctcgaaaccaaggtggacgaagccggtaatgtattgattaaaaagcccgctactccgggaaaagaaaatcttcaaaccgtcgttctgcaatcgcatatcgacatggtgtgcgaaaagaataacgatgttcaacatgacttcctcaccgatcccatcgaaacggaaattgacggtgaatggctgaaagccaaaggcacaaccctcggagccgacaacggtatcggtgtagctaccgagctggctattctggctgacgacagcattgagcacggtccgctggaatgcctgtttaccgtagacgaagaaaccggactgaccggagcttttgccctgcaagaaggttttatgagcggtgacatccttctgaacctcgattcggaagatgaaggggaaatctttatcggatgtgccggaggtattgactccgttgcagaatttacttataaggaagtggaagttcccgccggatatttcttcttcaaggtagaagtaaaagggctgaaaggcggtcactccggtggcgacattcacctgggacgtggcaatgccaacaaaattctgaaccgtttcctttcacgcatggctgccagacacgatctgtacctatgtgaaatcaacggtggtaacctgcgcaacgctattccccgcgaggcttatgccatctgtgctgttcccgaagacgccaagcatgatgtccgcaccgaactgaatattttcaccagcgaaatggaagacgaattatccgttgtagagcctgacttaaagctggttctcgaatcggaaactccacgcaaaatggctatcgaccaggatactactacccgtttattaaaagctctgtatgcagctcctcacggtgtatatgccatgagtcaggatattcccggactggtggaaacttctaccaatctggcatctgtcaagatgaaaccgaatcatatcatccgtattgaaaccagtcagcgaagttctatactgtccgcacgcaacgatatggcgaacacggttcgcgccgtattccaactggcaggagctaatgttacgttcggtgaaggttatccgggatggaaaccgaatccgcactcggctatcctcgaagtggcagttgaatcttacaagcgtctatttggtgtagatgcgaaagttaaagccatccatgcaggattggaatgtggtctgttccttgataaatatccaacgctggatatgatctctttcggaccgacactgacaggtgttcattctcctgacgaacgaatgcttattcctactgtagaaaagttctggaaacacctgttggacatcctggcacatgtacctgccaagaagtagcgggcaaataagtcaacataaagaagagtatggtaacagtcaaaaaagaatagctgttatcgtactcttttttactatgattttatcaggtgtaagtttcctcgctccttgctctgttatagcacaagactatcatagcaaacaagctccctgtcaggaagaaagaatccctttccgtgttgtcagctggaacatagaaaacctgtttgatacgcaccatgacagtttaaagaacgaccacgaatttcttcccgatgcgctgcgtcattggaattatagcagatataagaaaaagctgtctgatgtagcgcgagtaatcacagctattggagaatggaatcctcctgcactagtcggattatgcgaagtggaaaatgatacggtgctgcgtgatctgacccgccgttctcctttaaaagagcttaactatcgttatgtaatgaccgattcccctgatttgagagggattgacgtagccctgctttaccaacgggatttattcaagctgttatcttcccgttctatctccattcctctgttgggacaataccgtccgacaagagatttgctgtacgtcagcggacttctgctgacgggagacacattagacgtatttgtctgccatctcccaagccgttctggtggagctaaagaatcggaaccctatcgtttatacgcagctcaaattctgcgtacggaagtcgatcacatcctaaatattcgttctcatccgcaagttattattatgggggatttcaatgattacccgacgaatcaatctatccagaaaatactggaggccgaagcgcctcccattactaccccaaagccagcctcaacactcaactccaccaacccttcaacaattgttccttcctcactaaaactatatcatctgcttgcccggaaagcgaagtcaaaaagcttcggttcttacaaatatcgcggtgaatggggattgcttgaccatctgattgtatcgggtactctattaaatcaatcgagccattttttcaccagtgaagaaagagcaaacgtctgtcttctctcctttttactgaaagacgacgaaaaatatggggataaagagcctttccgcacttacaagggaatgaaatatctgggaggcatcagcgatcatcttcctgtttatgcagactttgagctaaagtattccacagattgacggaaatgagcgcagcagacaatccacattgcatcggcaaatcaagggttcaaaaaagagcaatgcgctactaatttttcaatgattcttcgttacataaggctttatcacatcaatactccatgcataatttagatttgcctgtgaaccatcataaaatgtgccagatgtaatacctactacttccccgtactcatttatcaatgcacctccactactgccatgatcaatcagggcactgatttgcatcagattttcatctctccactgcgacacttcacctgaagaaaaagtgttttccaatccacggggactacctatagcgtataccttatctcctacagaaggagactttgaagcgacaggtatataattaaattgtttaccctcctttgttgcaaccttgaaaatgataaaatcattatcttcactttttacaataatatcctccacatttaattgttctccagatgataactttatagtttcaagccctatagaagttcccttgaaaacatgataattactcacagcaatcccatcagaagaaataaaaaatccagatccttgaaaagtatgataaccatcggaagtaaagatcataaacacagcactgttatatcgcttgaaaatttccgttcccgacatcactttagtcttggatgacaaattcaagtcaatatccatctttttctttttatttacaatactagtcttttccacagtcttttcttttttatgctttcttcctgaattaccacaagaagagaacaacacaaagaaagctatcataaaaatacataacacgctacgtttcattgttttttaagttttatctgttcaataacacccggtttaggaatgatatgaataaggaaacgctgattggcactattacctttgacatctggttctacgcgcaaactaccggattgaccactgccggaaataatcagttcacattcatccttattgaataacaatccgtattgctcccaatatttaactaatgccaatgcccgttcgtaacttagttcatagttcctctgaaaatagtctttagaagcctgcccttccacaaccaacaaatacttcacaccatacctctgtgacgctgccgatataaaattccttatggcattaccggcatcaagcagtttttctcttatatccaaaggtatattctctatatccgaactaccgacatcaaacgaaacgtctattttcaggatgtgcttcttatgttcttgattatattcgaaataagtagtatctatttcattaacggcattttctatctcccttattttttccatctgctcttccgttgcctctttcactttctcaatttcatccacttgtctcttcagcataacagtggtcaagataaacagaacaagcataatgaagaatagacttgtcatcaagtcggcataactagcccaaaagaaagaattatgtttcattacaactcatttatcatttcaataaagccatacacataaggagcagagcacttcctgatgccaaaaacatcatgatacccaatatccaaagagcgacattcctaatcatattctttttcggagatgttgccataaccacaccatttatcgaagaaagatttttaatggcactacataaatgctctatttgctcgctctgcctttccatcatcgcccgattctgtcgcaagagattttctattgccccatcagattgtgaacctaatgattgttcaatgcctaccatacactctttgatagcggcaagattctttatttcatcaataacaacatccaaatcgtttattttttctttaaacaatttgtcctgaccgtcaatgtgctgaaacattatttcacgttgttcagccaaccattgttgatgtttttcttcgacatacttcaagttatcactaaatttgctttgttgttccacaaggaaatgagccaagttattgattccttcttccgcattatcttgcaaggcaagaaatgatttctttaaggtatcgtccacctgaactaccgctttattaatttccgaacgtctcatttgaaaataattattctcttcttgaaaataagtggaaaggtttgtcaaagcagatgtttgctccatatattccccaaccttattattcagttgccgaacagcctgaagatagtcagatgtctgtgacaaataagttgccagttgctgaaaattagcagtacttttttcaaattgctgaagaatggaaacattagctgtagtcatcctttttatatccagatttttgagaagttccaagattttcaattgatcagcaaacgacccgctcatttctttcaacgcattttccatcctgcctatattaaaagagaatgaaagattgaacgaggtcagattttgttgcaacagttgcagtgtattagccatatttccggacaaaacaggaagaagttccgcttgtatccaagaataaaacccatttttatctgcttccaacttatttttcgacgttttggatttccaagaagaaatagtagtaagcaaaattcccgtaagactggcaagcatagctatagcaaccccacccattaactcaccgatagcctgttgaggattatcaataaatgcagaaaagcctccacccataattgcgatacgaccgataccgataataattccaagcatcgtacccatcaacccaatatacaacggtataggtgtttggatagtgatttcctcctcttttgagtcacagtttctctcaacaatatcctttattagcataaaatcgctgacggctcccttattcttttgcaaataattattgatagaatcgaggatttttcgaaattcactcgaattcttatcgagatcagcagatacaattttaaagactttaatcgactcaacattgcctccggtttcgtgtatatcatctattaacgcattatccttcaatgagttttgtaaaacgaataaagtatttgacagcggaaacaaattttctacttcctttattaatttacaattgtttaaaaagaccttaaactgaacacacaccagtacaattaccaaacctacaataataacatagtccataaattcaacaagttcaattattttatttctatttttgctttatcaacgattctccatttgccattatcttccaatacgactctacccggagtgatggaaaccgtctttcctttttggtaagcacctttcacttcgcaagcatccgtaattcctgaactactaacccttgacaatttaacttcatacaattgctcatcatcaataaggacaaaattctgctgatttacattcaaccgatatacagacttttttgttttattttcattaacacgcacaaaacaatcatcactcacatctacatccgcatagtaaaaaacaagcttacttaccgctactgttttttcagatattgacagatccataggagactcaacaacattctcccctgtttcaacagtattattgactacctcttgttgtgtaccatcagtaacaacactttctttacctttttcttctctcctatctttttccagttttttaattttatcgttcaattttttattttcttgttccagtttatcaacgtctttctccaaatttctatagcttgtttttttgttatctaattcatgttcacaattcaacaatttgaaaaatagcacagctacccctacgacaagacaaaaaacaacagaacctagcaatatccaaaatccaataggcaacctcgcttcactactctgttcttgaaccttggtttcacctttctcttcatcctccggtttattctgttcttccgaattctcttcgttttgaaagatgtaacttaaaattttgcgttccaatacacgttcatcctctctcttaatgttgaatctttcaaatccttttgcatcagcgaccttataaacaaactcaaatatttcatcagacgacttcaaatattcaacattcctgtcatttaagggtttcgttaaattttctgcagttgttttcatctcgttcgccttcagaatacgatccaactccgcatattgataagcattttcaatggaaatagtatctattcctttgtttttaataccttgattttctttcttcaaattcggatgagccaagatatatcttgcagtataaaaacaattaacgtaattgattatctgtttttgcttttccctactaatgttttgcgctttgcaaatacattctacaccaccaacaatcatcagtagcataatgagcagtaacttcttcatactattattattcatcttccggttctaacattttttcactacctcctatggcacatagtatttcacgaataggatagaagaataacgtttcttccacttcatctttcccatctttcccgctaataccatcctttactgacttggcaatatctcgactgaaatatggtcttaaactttcccaatcttttgttacaccaaaccttttgttgaaagaaaactctttgttcaattcatagaataaatcggtaaacgcattaatttcatttaccaccccatttatcacatttgaatcaacatctgcatatttaaaagaggaagggacaagaatatcttttgttcccaacaagcacactttcatttcatccatcttggctacactcatcgttttcatttccaataatccacccttacaagtcacctctttaggattgctggtattgatcagaatatccagtccgttttcatcatacttctcgccatacactttttcaaaaataagttttgtgtattcctccagaacgcccttttcacggacagatactaatatctgaagaatcttagaaccggttccgctaaacgccaaatgtcttggacaatccagcaatttgcctttcattatttttgcaatatgataaatcaacgctgtataaaaaagaaggaacaagattttcagcttagagtctgaaaacaacatcgaactataatttactttactgattatacccctttcgacaatatccttgttccgcaccaaagagaataaaagcatcacaatatccgaggcgggtctatcttcctccatccaactatcgaccaaactcattacctcgccatttgtttgcgcgtcaagaatcttacggaatgtgtcaatatacttacttataaacggattactacgcgatggctgacaatcaaagattgaatttgccgcaaaacgacaggatgacagatagaggggaatgccgtctttcaccagtagaatgtctgaagtgcctccacctatatcaacggatacaacattagtcgtcgccttattgtttttcttgtaataatagtaagggacaatcgattcagacattgtgacaatctgcgtttcagggtctcctccaaaatacagggcataaagttcaatccaaatatcttcgatttccttgacgcgtttagaagacatactagctggataaaaccatgccagtttggtagccgacaaatcaccgccattcatcagcactttgtttcgcatcagtataatcagattttcaaaataagagcaaattctatttcggctttcttgctcatttgcccattttaagtcaacagatgatttattataaggaggcaaaggaaatgtttcaaagacaaaaggcaaattagtttccgccatgggagtcacagtatcaacaagccaatcaatacctattttttcagatagaaccgtacgggtagggaacttgaagctcttcccaatgacattcggcaagaaatcggcctgaaccggattatcagagtctttaccatagtttaaactcataggttgtatcatacgttcatcttcactgatagtaaacggctctatttttccaccatccttccgacattcaatgtgagtattcgacgtaccaaaatcaacggcaaactcaaatgattgagcaccggtttttccatgaaactccggaataataatattctccaccccttccacatcaaaaacgatataggagaaagctttgtcaaagacaaacgtttgtggatcaaacactccacctcctgtcggctttatcatctctccatcctctgtgcggtttctccctaggcaacactttttctcaaagacatccttaccatctccaaaatgcaaatcatagttatcatcccccgcaaaatccattacattgacacgataatccgctttcacattgtttttcaccttcaaaaacggaaacaaatacaagccaaagtctttcacgattacccgtccgttcttttcatccgaaactccggaattcgtttcataatagaatcgttcgtatgtaacataattcacctgtccgttctgttccttaatagggatttccaatgtcactttcaccgttttatcattcgacacatcgcgcctttcaatgcgaaaatgttttttgagatcatctatagtgaagtatttaaaatactcttttttgatgggaagcagatagctatatccatccgattggctacacaatttgtctcctccattataaaaacaagtttcattcaacggataagtgttgcagataatgacatcctctagaaaatcgcccattgtcagataaggataagtacgtccatccaccggcaacttccgcttggaaagatctttatttttgtcatgaacaggcacgacaatcttatcatcccatggatcttgtgtatatatcaacggttttctgaagatatcaacaggaagcaccaacggtttctttccatccactgaaaaatcactgtctatcacaaaatccgaacaaaacggactgtccacatccagacacttcagctcacagcccagcacctccaccaaatcgtctctgttgacaatgggaatagacttatatttaaccatttgtgcttccgtcatcacattaaccctgtctttaagttcttgcggcaagtgcctatatgtcaaatccaaatattcatctacttccttaaacaaatcagagaaagaacgttccgtgcttttttgcaactgattccagtaattcttcagtccaaaccaatacagaatgaaatttggatcacgcttatatagcggctgaaaatctgaatcgaaaggcttgtcattgccaaatcgcacatggtcagatacataattcagattattggcagatgtaaaaaacaaagtcaccggagaagtggcacctacgatattcaactgggaaggtgcatccgggcctttatagttcagtaaatagatattcttaagcaaatcaaaattataggctttcgcgtcctgattcaaatacataacaagtgtctcgcccaactgcttatgagccggattacctccctcgagcagttgtttaagagaactttccttgttccatgtaataatgtcaaacttgtcacgcagcttttcaatattaaagaagatttccgccacatccaaacaatccgaaaccagtttatgatagatggtttctttattatccaggtctttgctttccacaacttgtctgaacgcattcttcattaaatctatacgagcgaaaggactgggtatagatgttatttctcttttgcaggatccaccctccgggtcactgatactgctgattgcctttgttccatatccattggaatcattccagccttcgatattatcattaccaccggctgtatataaacgaaaaacatgtgccatattctacaatctgattttatcgttaataagctcttcggttaccgtataaaacaactccatgaaacgttgttctaaagacagtccttccttgaattttttctctttcttattcaaatagccatcgaataaagcataatttgaatccacacgaaacagtacttttttagtttcgcaccccttgaccaaactgaacaccgcattcctattctcacctaattcaaaaggagcgaatccgcgtttgttgttttgcatttctgtcaaccatgtcacatattccgccacgaatctattgatatagcttttcacataacggtcagcgaaccattttttttcattaaagcgaaccgtccaaggcaatttttggcgaatggaatcactcaactgctcgttaatgaatttacagaacaaggtaaactgtgtcaatggtttggcaattgtatcataagtcatatcacagagatcgggaagagtcagattctcggaatttgactttacaccaaactcccgataaatagtttgaggacttctttccttgatactcttatcaaaatccacaatagccaaagcggctgcaagttccatcaaatgagcatcattcttttgattttcaccgccttcgttgttttcatacttattctttatgtcatccgccaaatagtacaagagatcaatagtactcatattctgattatagtaagtcaatgccgccttcgttttcgaaatgaacgtagcctgatcaatagcactttcgtcttttggttttacgccaaaatagggcaatacggaaatagctcctatcacgcagtcctggatttctttaccattcggaaactgactgtctttctgcaataatgtgcgcaggttctttaaaagtacaggaaaaccactggctcctgttccaccgaatatggaactgataataaagatcttgtctcccccttgaaaatcggatgcaaaatcaagaaactgaacagattgagtgaaacggttgagcaccacactcccaatattgggatttcctttaaaacccacttccatatccgaattcaaattatcatccgaaaacaatattttggcaaaagcttgattggctctatccatagtactcaattgaatatactccttgaaacgcaaattttgagtattttccagattcattctaaatcccggcaatagttcccttatctctgtacgaaagaaatcacattgagtatcggtggtaaaggttaatttcccacgaatgttattaaacgtatgtatcaagtccacagtacgtgtcaagtcggccgctgctacatcagggtctataatgataggaacaatagcatccgagtccatttgtactccactcgccaacaacatggttaaagatttgataactcgcgatccggttccaccgattccgaaaatatagattttactcatactgacttttttatttaaaaaggtgattttctacaattaacgcttctccatttcaacaacatcgaaagcataaaaaaaaggaataaggatatgatggcattggcaagactgaatccccagaaactgctatccgttatataagactcgataatagttccggcttcatctctctggtaaagcagacaatcccctatcaagttgtttttaaagtcctcaataatccaccaataggcaaagaaaaagcagagcaaactattggaaaacagcataatcaaccaactccaccaacgatgaaaacgactactgtttatgatataatagtagagcacacctatcacaagcgagatagaaagagtccataaggcaatacgcgaaaagagtgcaggattggtataatctcctgtctcgcaattatatccccacagatactcacccagttgctgtccgaacaaagattcaaaaaagcaataaatacggcctataaattccataacctaaaattattaattaataaaaacttttaattccgcaaagttgttgttatcatccttggtgaaagcttcatagattccctcaaaaagatacctcaatccataggtttgcgtcatggcatcaccttcgtgtatatctagtccttcttcatccgtacattggataatccatgacggcaaccgcttctttaacgcaactttcaaatcgcatttaccaggcttcggcattttggaattcaacgtaaaacctaacagatgtgaatgttttcctttccctttgaaggttgagacacttaacgcataatctttggaattcaattcataattctccggttcaagcaaatagtcattttcaatcggaaaatcggaaaaatccacacccaaagaaaacataaagtttcccttgttctttcctttagaggctttttccgcatcaacaatgtgatatttagggtttttcatgcacttcttgaatgtgccaatcttaggaataccaacaatttcatagtttaccttatgcggcatattactgatggtaaaagaatgttcaacccctcttcctttgattttatcttccggcacttttcgggtgatgacattgaccatctcctcactccctatcagcaggagataaaaaggacgtatttcattgatattggtaggttgattcagcctattatagtaccgtcccttaaattttccatttagccgatatgctttcacacaaaggtcattatagtctttcaatttatcagcgaaagcgaccttaatgccaatttgttgattgacaagatattcggaagcattaacgccactacccggagaaaagatgcaatcagatatgaagatggacaccgtttcatcatcggtcttatccaaaatagaagtcatcatttctgctatatccgtcacacctaaagaacctcccgcacttacaaaatgattgggagacaacttctcaataaaatctttgatgcgagcactatgtccaaggttactttgctgtggaatgattcgattgttaatatagtacaagttcaaagagtcgataccactcaaacaaatatcggacaaatagctgtatacagattcttcaaactccgtcaatccattgacatagccgaacatactgcccgagttttccaaatatacattcactatcggtttttgcccacttaagttcctggacattcccgatttgaacgtttggcatcgaggacattcttttgtgcccaaatcattacagccgcatagcataaacatacatacagtcaatgccactgcataaagtgattgatttagcaatccgcttacccgcatcatagcgccttaaaagtgttgcgcccgacagattcccgaaccgaacggttcataaattagatataagtaatcatataaaaaaaaagcgcgggaatctgtacctgtcactcgtcccgctactttaggccttcgcattgcccatcactgtagaacgagcaacgcagaagcccacgccgatatgtatacgaaacatcatacgcctttcaggtttcccccaaaagcatatcaagaatataaacatatcccgcagacatctaccgttgctttgttctttgacagtgattaaaagttgcgaagttttaaagtagccaaagacaaaacgtcaagtaaacgcctttctttatataatatacgccccacacctccctaatctcataaatgagatatcggcgtgagatcgtttgcaaatctatgaaaatataattgaatatcctacatcgagacaatctttttgtttgctacctatacaaagacaccgtttcccgccgactacgttcatattaccatcacttctcttccaattcattaacaaataaattgctcttcatcgctcacaaacttctttttgccgaacaataaacttttctttgcctaaatataaactatagacaaaggctttgattgtaaaattgaaagcttcatttttataaatgcaagcttcgtttgtaaaaacaaaggcttcgtttatagtttgtgattaggcaaaaagctctttaaaaccggaagaaaggaagtttggaatgagtacaaaagaagttttctattaatagaaaggaacaaatctgctaatactttaaccccactgatataatgcgtgaagatacaccatatatataatattacacacatctgcaaggagacagggaaggcgtgatactaatccgagtactgataaacttttaaatcaaacttcggaatcattgccagcaaatgatcgaagatatccgactgaatacgctcgtattctttccagaccttattgcgggagaagaaataaacctgaataggtactccgtacatcgtagcttctttctgactgataatcaaatccaactcctgattgaccacaggcagactacacaaatagcgttcaatatataccctgtacacttgagaattggtaggaacgactccttcttccggctgataatccgccattaatggaatttctttccggtaacggtccaacatttccggagtacagaattgaagtgtagtcaaatccaaagttatactcttcatcacccgtcgtcctcccgactgtgtcattccccgccaattctgaaaaggactgctcactaatgtataaggaggaatagtggaaatggtattatcaaaattctggatcttgactgtattcagcgttatttcctgtacaatgccatttgcgtcaccggaaggaagcgtcacccagtcccccggacgaaccatatcgttggcagaaagctggatacccgccacaaaacctaatatggaatctttgaatactaacattaaaatagccgctgaagcgcccaagcccgcaaacaaagtagccggagacttattcacgataatagcaatgattacaatcccgccaacaaagaaaagaagcacctgcaacacttggataaaacctttcatcgggcggtctttcatcgactctcttccgtcatagatatccattatcatcaacagaatcccatttatagccaatagtaaagagaaaataatataaatgacgcacgccttctgggaaatcagcaacagctcttttccacggataaaagccatcggcaacaacgaataaaccagaaaagccgggatggtatgaatcaaattatgaaataccctacgcttcatcaacaatgtattccattgatgaggtttacgtctcgtatactgtttcatacctccaataagaattgcctggcaaagataattcaaaacgatagcaaccactatcatcagtaaagccataatagtctcatcaaaacgatcggcaactgccggatctattccccaattaatgagggttttattcatccattttcctaaatctactactaacataacttctgtctttttttataaataacagtaaaatattcatttggtttagaaaaaaagagactagtatccgatttatcaagaatcaagacaccggtctccactgctactctctaagcatatcatttttcgatgagggctccatcagggaatcaccatcacccctatttcattcatatttactttagcaacggtagcatcaggtgtagtggcctccagtttaatgaaacgtgcctgtactttctgactgaaagcaaccgtctgtggcaacggattatgcataatattgctgaactctccactggcaggcacttctttccagctcttaccatccatgcttacaaagaattgataacggaatgccatcgtcggctttgcctccgcttttgaaggcgcgtacgtgaaactgctcaatgttaccgtcttccccaaatcaatcgttaatggagaagcagcaacctgtttccatccggaacgcggcaaattattccagtcttctttcgttgtttcttcctgcaaaggttctgcataataagcggcaacctgactaacgtaagcagtcaaccggcactcgtctattctcacccggagcttattggcattaactgccggaaagcgcaacatacgtttatatcctatcgtcgtaccttttcctacttctttccagccattatccgtcaaggcttccacagtaaaagcctctaccctctgccctttcgttatatcttcctgcaacatgaccagattgatttccgatttggacttcaaggcatagacagcctcaccgcccgaagtagtgctccagtattttcttccgtttttcacccggttgtcagcaaacgtttgttgccgataatcagcaaactctttcaaccgcttgatatcagcttcatgaatcagtcccctccggtcaggtggaatattcagcaggagcactgaattatatcctaccgactggaaataaatatctgataaatgcttcaaagatttcactttaccatcttcctccgcatgatagaaccatcccggacggatagatacgtcgacttccgaaggataccagaataattccgtagctttctccaagatcttacgacttcccaaatcctctgctttactgaaaacacccaaacgtttgttgttctcttgtgaacgggcatatataccgggagtcaacacagttgcgttccattccgtttcacggcctactcctttctcgtttccgacccagcggacatcatcccccataattgccatcacagctttgggttggaggcgttggatggtttggtaaaaagcgtcccagtcatacacttgcttctttccgttcggaccttctccattcgccccgtcgaaccagacttcatgcacttcaccataattggtgagcaattccgtcaattgccgaataaaaaaatcattgtaacggggagagtctccataacattccgcattccggtcccagggagaaagatatactccaaacttcatatcatatttgtcacaggcagcacgaagttctttcactacatcgccttgtccgtttttccagggagaagaggccacggaatgtttcgtagtagccgttggccaaaggcagaaaccgtcgtgatgttttgcagtcagaagcaccattttaaagccggcttccttgagggtacgtacccattgttcagcatccagttccgaaggattaaagagcgcgggatcttctttcccgtccccccattcacgtccggtaaaggtgttgataccaaaatgaaggaaagctgttaattccatttgttgccaagcgtattgctgtggagtaggtaccagacgcgctgccatatcaaccttctgttcgatagttgcactttgaggaaattcaacatgcttcacatagtaattttcttttttctgcgcctgcgctccactcatgagagtaacagacaataaaagagaggttagtagtttattcatggtctattaattattgcaatcgtacaaagataaaataaaggtgcagatttcacgatcctcatggaatattttcttacgacattccatccaatcagtgtaacccccacctttatatataatctaaataacctattgatttagtatctatttcaccggataaagggtaaattcaaaactctgtttctttaatggaaccaagtattgcggtaatactccgggaccacaagtagccgttcccacacctgcctgttcagcatccagatgcactgtcagcaatccatcgcgttccagttcattgatatggcgggccttctctaataatacatccgaaaaaggaatgatactaaactggaaagcacgatccgactcaacaaagataccttcgccggaagtatctcccaacttcacccaacgtacatcggtgcggttgcctgtagattgcggagcaacataatagtggaacatccgttccggtgtggtctgatatacaccgattttaccggactgattgcggtcaatataggtttcattatctccacgtcccaagtaagaaacctgatcgtaggcgttcgacacacggaacgtcaatcccaggcgtgccattgatttcacgatggtcgtgtcgggttggaaagttgtatgtactttcagtgcaccgtttctatccagtgaataaacaaagtcagcaattcctaccctttgcgtttttgcatttagaatttctacacgggcagtggtcgaagtcttactttccttcaatgacactactttctgggtcagacaatccaatcccgcatcacgccacaagcgtgcgccgttcttatcccggttgtcattatccgttgccgggcggtaaaggctcaatgtcagcggagtagccaataattctttgccgttcaggttcaatgaagtcagtgcgccagtttgcttatcaacggtgaaagtcgtttcacctgctttgtgcggacggtagcctgtgtagttcttattaccggcaaatacaaactggtcgtatgccacctcccaatccttatctatcattgaagaagcttcacgacgggtccagctgatattcaaataagcctcacggactgtattcggaagttttacagcacccaaagtaacatcaacagtagcgtgcggtgcacaatcaaccgtttttgtaccttccgccaaaatcttgccattatctgccgtcacattccagttcagtacatactcattcaagttagagaaatcataccagttcttgacacggatagtcagattcttctgattcgccagcgttacttttatgttctgatatactttctttacttcgagcaaatgcgggtgcggttcacggttggcgcccaccaaaccgttacagcagaagtttccgaaacttggaattccttccggtccgtaatcaccgccatacgtccagtaccatttaccgttcttgtctatttcgcggaatgtctgatccacccagtcccaaacgcagccaccttgtgccatcggattgttttcaaatacgtcccagtattctttcagtccgccgcaactgtttcccatcgcatgaagatattcacaaagaatgaaagggcggtagatgtctttctcttttacgtatgctttgatatcgtctacactgcggtacatacgacagtaaatatccgtattatagttcaattcggcacgttcatactgtacagggcgagttttctctaccgatttcagccagtcataagtacgttcgaagttaattccatttcctgcttcatttcccaatgaccagataacgatagccgggtgattcttagaacgttcatacatccggtgagtacgatccatgtgtgcagtcagccaggtactatccttggctagggaagcaggaccatatcccattccgtgagattcgatgtttgcctcatcaatcatgtacaaaccgtaacggtcgcaaagttgataccagtaaggatgcgtaggataatgcgagttacgcaccatgttgatgttgtgctgcttcatcagtttgatgtccagttccatcagctccttgctcacggtacgtcccagttgagaatgctcgtgtcggttggttcccttcaccaataccggaacgccgttgatgcagaaacgtccgtctttgatttccgaggtacggaaaccgacttcacaaccagtcagttcggttaccttgccttgttcatccttcagttcgagtattaatgtgtaaagatgaggatgctctgcactccaagcctttacatcgggaatattcttttcatcaaacgtgataaaattgctcaatccgcgggattttatccggatagcatcctgcaggacagctttaccattggcgtctttcagggtataagcaatagaagtagctccagatatagcagaatgtccctctacggtcacttcaagtccgaaaataccatctttgtatttctctttttctaaagaagcattcagtttataatccgcaatgtactgtttgggagtactgtaaagatacacgtcacgttcgataccactcaaacgccacatatcctgacattccagataagcacccgaactccagcgatacacttccaaagcaaccacattttcgccttcattgaggacatctgtaatatcccattcggcagccgtctttgatccctgattatatccaagtaattttccattcacccatacataatagaaagaaatgactccttcacaacacagtactaccctgcgtcctttccagtcggcaggcactttgaaggtacgtcggtaggagccgacttcattctctgcataaggcaccagcggcggattcttcttgaagttgaacattttatcatcaaactcatacgtttcgttgacatagatagccgtgccatacccctggcgttcccagttaccgggcacattgatatccgcccatcctcctgtataataagaaggttggtaaaagtccttcggacgattatcgggattcttcacccaatggaatttccactttccattgagactcatataaaaaggagactgttcataccctcccggcttttcaatgtcggaagcgttggcataaggccatacgtatgtgtgaggagcgagcttgttcagtcccaccgcatactggctttgccattcgggcaacggttgttgctgcgctaaagtgaaagtagcagtcagtcctgacaatagaactaaaagagttcgtttctttaagctaatattcataagcatgtcatcataattggtttatataataaattaggcacagattaagctgattgacgctattattttatatactcatcattctaaaaaccgtgaaattcgtgtaatccgtctctaataatataagattattctgcaagagcacttaattgctgtttttaactatttgattactattctataatcacttcatcaaaatagactctcgcttcctgaccgggacggacatgctcgtcgggacatatccccgcaccttccgccgtcactcggacataacgggcagatactccgcccatatctatcgaatagtcatttctaaaagttccttccagatagatttcttccggagagaagttcaattctcccatagtatggtaggttcgattgtcatcggaaacttctacgcgaatcatcttcggtttatgtgctcccattccataattcgtaatgcaaccgatggcaaatttattcaaaatctcccgcccctgcaaatctatcgtgaaagatatagaatcattttgattccagttacaccattcaaaatcagtatatttcaggcttccccgcaatccgttgactaataacatttcgttcttcttattgccaagcaaaggttttgccgtagctttgttccatgtgagttgcaactctaaagtttctcccatttgcttgccgttcataaaggtagcggctttcaccatttgtgtcttcgtcacacggataggtccgtcgtaacgatgagaagacattgccggattacttccgttcagtgtataatgaatctctacatccgggcggatacattccaaattcacttccaaatgtccgtccactgatgtcaccgtctgttgtatgttatacattgaacgggcatagacaattcctttttccgcaatatgcgcgttgtatgcgtccatccgcttcaagaatccagaccagtccttcgttcctgcgggcgtccatgccacttctgctaaagcggccaggcggggaaacaaaagataatccacatcttcgggtttattacagaactctgtccacatacaagcctgtactcccattaacaaagactcatattccggtttccaatccttctgtacaggttcgtaatcgaaaacatctttcagggtattgttgccaaaataggttaccggttcaaaccattgcggtccctgataacgaatcaagtataagacacgcgccggagtcatgataaaacgatgtcccttttcggcagctttcagagcagccgtacccattccctgccagcctaggataatagattcttcaggaagaaaagagctgtttgtcaactcatcccagccaatcacttcacgacctttcttacgcagataatcactgatacgtttcatgaagtaaccctgcaaatcttcttcattggccaaacgctgttttttcatccgtttttggcaaagcgggcatttctcccagtttgtctttcgcgcctcatctccaccaacatgaatatagcgagaagggaaaagctctagaatttcgtcaaaaacatcttgcaagaatgtaaatacgctatcatttcccgcacagtagataatctcggaatttcgtcctcccagtccgggaagtacaccgacaaagtctttcacaaccggacaggcaagctggggataagcagctagagcagagttactgtgcgccggtacatctatttcgggaatgacttctatctgtctgtcggctgcataagctacaatttcccggatgtcctcctgcgtgtagaaaccgcctatcggagtaggttctccccgttccgggttgcgacgtgagtggaaaggcacatctgtacggtctactctccacgctcctatttccgtcaaacgggggtatttctttatttcaatccgccagccgttatcgtctgttagatgaaaatgaagtttgtttattttcagcatcgccatacagtcaatgattcgcagtacattctttttagggataaaacaacgtaccggatccaacagtaatccgcggaaaccgaaaccgggttcatcctgaaccgtcattgccggaactctccaatcgacattccggaccggttgttccgattctatggcagccggcagaagttggcggatagattgcagggcatagaaaaagccttttgtatccgaagctttaatgagtatctgttccggcgtaatctccagtaagtaggcttcactttttaaagaagaatccgtcacaaaacggacttgtccctcttcacgcccgacattcaaagcaggagttattccggcagcacgagtaaacaagtcaataaaattgcgggcaatcacggcttgttcctgactttctaccgcaaacaccgtttgggctgaaaaggtgaagttaccacggcccggcacaatctgtgtcgggcgtggtactattgaaattaaaggggatgttaagttatcagcctgcaaaaacgctgtcagtggcgaaagcagtatgagaatgattaagatgtattttttcatggcgtatgtacattggtattattccttgtctctctccggtgagaagcggacaggatcattgtattgctcctgaagtttcagcatttcttcttttagttctttcactaccggttcatattcagattgtccgtagaggttgtgcatttccgacgggtctgcctgcaggtcgtagagttcccaccagttaatgtcattatagaaatgaaccagtttatagcgttccgtacgtacaccataatgacgtttcaccatgtgttcagcgggatattcgtagaaatgatagtagagagccttccgccaatctttcggatgttcgcctttcagcaaggggacgagggatacaccttgtatgtctgaaggaatctctgctcctgccaattcgaggaaggtaggtgcataatcgatgttctgaaccatttcggtgatgtcgcccctacggtcgaatcctttcggcagacgcatgatgagtggtgtacgcatggattcttcgtacatgaaacgtttgtcgaaccaaccgtgttcgcccatgtagaatccttggtcggaagtatagacaacaagtgtgttatccagtaatcccttctctttcaggtagtcgagtacacgaccaacattgtcgtccagcgacttcaccgtcttcatataatcgcgcatataacgctggaatttccagttggctagttccttgccttgcaggttctgtttatagaaatcgtctattattggggtgtagaatttgtcccatgcagcacgttgtgcttcatccatacgaccaatatatttctcatataaggatttcagacgggtatttttgtcgggacgaagcattttgaggtcataaatcatgtccatgtctttcataatactcatctcttgtgcggcagcggcagggcgtccttcgtaattgtcaaagaaattgtccggtagcgggaaggttttatcttcgtacaaagccaggttgcaagtatctgccaaccaattacggtgaatagccttatggtgaatcaaaagacagaaaggtttctccggattgcgtttgttttctatccagtcaatggcatcgtcagtgataaggttcgtgatatatccatgtttttggatagtgtcattgttctgtgtgatgaaatccggattgtagtagtcgccttgtccggggacaatctgccagtaatcaaaaccggaaggcaaactttcaagatgccatttacctaccagtgctgtctgataaccgattttctgcaacagcttcggaaaagtctgttgcgaactgtcgaatacgcaagtggtattatcatagaatttattagcacaactatgtttacccgttatcatgcaggcacgactgggaccgcttaatgaattggctacaaaactttgagtaaagcgtacaccatcggcagcaatacgatcgagattgggtgtttccatgtagcgtgtgtcataacagctcatcatctgagctgtgtgatcgtctgtcataatgtagacgatattcaaaggtttctgttccacaggcttttgcttgtttgaacaggaagcaaaggaagctacagctgctactcctgctaaaggaaagaataagtttggttgcaatttttccataaatactaatttgtataagattgtgtcagcaaagatagaggacagccatctatttaacttccacaaattaccatttaatttccaataatctccatttctgcataattgactaataaatagccggaagcatatcgccttctaacgatagcttccggcataaaattcatttcacactattgaaagctaattgaaagagatagcattaataaaataactgattagcccagactttttcagcatcagtctgtacataattcttatttgtatagatacgaatccaatcaatttccattcgaggcgtattatcatccgtttcacaattggcaatacttttcagtacattatcccaaccttcaggcgctttaccagcagcccgttccgagctttcagccaatctcataaagaagtagagaccggcactgccaccagcagcagtagcaggatcaggattagcagtagcaggagttccagccttgtcgaatggccacctgtcaggagattgtgtacgattcacagtcagattggttgctccattaattcctaaattgattatattttcatccacaagttccacccaatatatattccattcattcgcttgaggtattgctacactctttgaacctatctcattatcaacagttacagcctgagtaattacagaaccttgagtgttcttgagaatatcgatctcatctttcgtgttcggaagggaatttttctgatttttaagtccgattgtcggaacaaaaccagtccgtattcctctcaaacgcgccttcacttcaattctcataccaggaaagaaccgagtatgttgtggggcaaaaataccaccaaatttagaacattgcaatgcggcgacaccgtaatccttggtagcagtcatggcaccagtcccctgaacatttttatccacccacatatttaaaataccttcattggttatatttgtacattttgcattattcacagcttgtattttctgtgacggtgcatcattaatatcagaaaaggcccaagaaatacgatgtccgaaagcattaggggtattatttccgccactaaaactattattaatataatggaactctatcgcattgcataatacccaatctttatctttcaaagctgaagtgggatgagcgctattcttattcatagctattttatctcccgtaaaccaactttcaattgcagttttatttttatcagacataaacggcctatccgggaattcatacaccttcgttatatcaaacagattaggatctcccatagattccaaatcagtcatagttatagtcagagtagaatttatcatcggattcgctggagaatcactctccagattcaataccagttgcaaatcccctgtcatttcaaaatcctgtttaatagtcacagcatcactttttgccgaagttcttcctgcaggaattgttaatgtagacggtaaattttcatacctatctccttccccttctttcggagtaattttcatattaagaggtacggaacttggtttttcaatctttgcaactaatacaaacttaccaccttccattactacattctccgcattgttctccaatgatgccattatccgataataatcggaaaccttaattacctgactggagccttccatcttataaccacgggcaaaagccgtaaagtttatagcagtactacccgtcagtccggatgcctttatcggaaaatccacctgaatctgtttctcccccttcggaaaagtaacgattccattgaactgttcgaatacattcgaagcatcctccgttccggctttcgccgtaaagtaaatatcaaaatcttcatttgctacaacctccttgccatcagcatccggttccacattaatattcactttcaagtgttctcccatcgcaaatgcgttgtcattgatgctcatcgttaatggcacgatttccggcagagggcggtatttcgtttcttcctcacacccagtcaaccccatggtcaacaagcatatcggaaatattttatataatatgttcttcatatctttatctatctaattatcataaatgaattttattcagttcccttacttagtcggccatcccggattctgattcagctcatggtccatctggatttcatccggtggtatgggtaacaagtaatcacgatcttcattaaacttgtagccttcaggcaagtactctttcaacggatccatccatccttcattatctgtcagtacatgattcagtccttctttccgcaatgtaggcgaaaagctcagataaagcacaccgtctttgcccagataagctccacgtccgcgtccttccacacctttcaacgtaccggctaccctccaacgcatcaagtcatccaaacgaaaaccttgcagagatagctctgaacgtctttcccgacgtacctcctgcactgccggcggcaggccttggaaagggaagtgaggatcagccgccggagtaacataggccacaccggctctttgacgcaatggctttaatgttttctctgccacgttatcattatactgccctaattcggcagcagcttcagcataacaaagcaacccttcggcatagcggaacatgacatgagccgtttcacaattgccggttacataggtcgtatcaatgccaaggcgagtatggaatccggtcacgttcttgtaaattccatccccattcaagcgcggagatgaaatatctttattcttttccttttgttctgcttcggtccctgtctcgtcatacgctctcacattcatcaagctattagacttgaacttacaaccggtatgcatcaccatagccaaaagtcttccgtcacgatctttaaatacctcattaaagtccttatacttttcatcggtcggatcaaccggcgtaccatccacattcagaaaattatccaccaaagacttggatagtcccgaaggcttcacattatctgttactccaccgctaagctgttgagtaacggtattgaacacgccatcagctattgaatattttttccaaaaagtcacttcgctaatgttggaaagatcgtttgaattgaatagctccgaaaaagcgtcatctatattggtagctttcggattggttgctgtcatatgcaaagtcagtccggccgggaacaaatattgatctccccagttcatcacttccttaaaaaactcttcagagttatcttccgttgcaaaatcagttcccttgtgatacttctcccacgaaccttcgtacaaagcaactcgcatagccagaatcatggccgtttctctgttgacacgcaatccactgtatttactgcgggaatgtaaattagcacgagcctccggtatcaacccaatagccgctttcaaatcgttcaggataaaacgggctgcatccgcacgttttgtcgcaggaatttgcaaaccgcccaacgtagcattgccatcccagaagtcatccataatgggaatattaccaaaacgtgtgagcagatagaagtgccaataagcacggaagaaatacgcttcccctctcaatgaaagcacttcgtccgtttcgtccacttcggaaactgcgtaataatgaaaaaagtaattcaccatacgcaagtttttatagcctttattccaatcgtcagagccactgaattgattattctctccattcaggcgcatatcatacttttccgaaaggatattgtcactgttcacctcttctcctctgacaccaataccatattgagccggagccggtagagaagtatacaaattatttatatagctttctacattctctctagttttcaagaaatcttcattgttaggctgcgtatagggtttacggtccaaatagtcggaacacgccgacaacagtaagcctgcaaaaacagtcaggataattattttatttttcatgatagcgttcctctttaattaaaatgtaaaatcaagtccaaacacgaaattacggttcatcggatacacctttccgttaccattctgattttgagccgaggtaagtcccggagcagccgcgttacttccgcctgcccacgcgttcacctgattaagggtttccggatcaaactgattcggcagtttactgatggtaaacaggttatcgcatgtaaagtatactttcaggttacttagtccaatattcttcaacaattgaggcttaaaagtataggatactgtcaagttcttcatacgcatatatgccgcattcagcatatagcgggtagtattgtatcccgtattggcattcgttgtctgggcatcggtcgtcagtcgaggtagatatccattgggattctcgggactgaaataatcgagatgctccttgaaccattctttaccaccgaataggtaagtactggcggccatcgggaaatctctcttggcaactccttgcagcaaagtggatatttcaaatcccttatatcctacgtttagattgataccgaaactgtatttgggagtggcattaccgataattttcaaatcaccatggtcggccaatgtacccttacccggatccactttaccgtcaccgtcggaatcaatgtatttcaagtcgcctcgttgccacttgtcaccggacttaaagaaactaagatctacttgtctgaggtatgcatccacttcacgattggacaaaaagagatcattcgcttcatatccccaaatctcaccaacgtccattccttcataatatcctttattagttgccaaaccggtatgattgttgtatatcaacccctccggattattatatttggtgacaacagctttgtaattgaatacattgaatcctatgccatagctaaaaccacatttcaactggtcctgccagtttacagacaattcccaaccacgattacgtaaagtagcgttattgaccttcgcacggtcatccgtactaatacctccgagattcggaatagcttcagcaggtccaatcatgtcgcgcgtggtacgctgataaatatcggcagtaatagacagtcggttatccaacaacatcaagtcgatacctaagttggcattatccaccttctcccacgtaatatacgaactgatcatcttaggcgtagtggctaaagttcctttttgaggagtagcttgcacaccgggcaacagccaagcattgggtgaatcggaggtcaaactctgaatcccaaggtaatcgtagagtcccgctccgttctgattacccaagcgaccgtaagaaacacgtactttcaattgagaaaccggcagattcaaagctttgaaatagtcggtacgagaaatgtcataaccggctgagaaagaagggaacaatccccagcgatttcccggagcaaaacgggaagaaccgtcataacgtccactgaattccagaaaataaatctccttgtaattccaattcagtttagcgtacatacccattgtagcccaatgcgtccggtcttcacctgccaatacttgcccgttagcattcacaaaagagaatatatcactagtcagcaatccgtctttataagtataaccattcgaattttcttgcagttccatctggaaacccgccatcgccttaaagaagtggtcgccccaagcatgtgtgtaggatgacgatacgtttggagacaggtagtagttgaaagtattaccgcgtgtataagagccccaattagagtttttccagttcatgcccggatattgatacccctgcttggttcccttacttatatccaacgttccgtcaggcttttcagcagtgggatatccgcgtttgaagtcattgttttccacatcgaagcgtactttcatttcacctacaatatcccaaccttccagcggagtaatcgtagtggcaaacgacatcgcatcagaaattctgttctgcacataatgcgattgtttcagataacggtattcggaattgtcattatattccgactttacaggaagatgggtaggagaattcggaaagctgcttccgatagttccataaaaaatggtctggttagccatcggacgcttcagtatattcagcgaaaggttattattgaaattaaacttcaaccatttattggctcggatctgaaacttcgagtttacattgtacttactcaagttatcgtccacttgatccagtaatccttcctggtaaatatatcccaaacctacgtaataattaaatttatcagaacctcccgttacgctcagattatgagaatgacggatggaagcttttttaaagtagtaatcataccagtcggtattggcatacacagcatctttagaacctgcccaaccggtaccgtccgcattaggtcctatgcccgggaacttttccgaataaggattctccataaagccctgcatcttttcgatgagcgcatcaggaatcgagtgttttactccatcgttatcatctcgttcgttcagataattggcaaattcaatagaattcatcatttggggcatattaataggagaactgaatcctacagtaccactgtatgatatacgtgttttttcctttttaccacttttggtagtgacgataaccacaccataggcggcacgtgcaccataaacggcagcagcagaagcatctttcaaaacactgatggtttcaatgtcggcaggattcacattctgcaaactttgctccactccgtctaccaatacataaggttcgcctccattgatagaaccgataccacgaatattgaatttaatttcggcaccggtctcaccgcctaccccattagcaaccgcatcagaagagaagtttaaaccggctacattaccctgaagggcactcgtgaggtcagtaaccggacggttgacaatagcatcggaacctacagtagccaccgccgccgtaatggtgcttcgtttctgtttatccatacctactactaccacttcatccaagacttttgtatcctcttttaacgtaaatcggttgccttctgcttttgtcacctttatttcaaggggagtaaaaccgacataagaaataaccaatgtgttacctactttccctttcacggaaaagttaccgtcaatgtcagtcagcgtcccatctttagaacctttcaccatcactgtggcgccgataatggtttcacctttatcatctaccacttgtccttttatcatttgttgctgtgccaacgcactcaaaggaaaggatagcaggagtatcagaaacagaatcaaaaatttctgtactcgcatgaacttctttttttccataatattgtatttgattaatttagattctcttttattccgtcggattcgcataatattcaaactcttcttttatggccttcaacaaagacttattattggttacgtcaatatccgttgccaaatcccaactcataatacctgcaaagccttcttcacacacatatctcgctttcttgcgaatcgtttctacactgttgaaagtatatgtatttcctttatatgtatatgtatcctcaatcgtagtagccagaccgtcattcacgaaatcataataggcagcaatcagactacccgtagaaccatagaaagggactcccatcactagtttattcttaggaattccatatgttatagccatttctccatcttttacaaattgctcataaggaaaacgcatcactgcagggccataacattgataagagataaaatccagtgcatcaatagcttccggagatattttaaaagaaaccggatgcaaagacgcagtgaagtaaacatactttcctaatgtagaacgcatttggataactgttgcactataattattaaattcattcgtatttgtaggccattcaaaatcaaaatcaactccatcaaaatcatattgttcgataatcttcttcacctcggaagcaaatcttgtgcgagcagtggcatcagccatcatctttttccattctccaccggcaatgcccaagcgcaatcttctatctccctgttgtccctgtaaagcggtacgtatattattcaaacgccccagccaggaatgtgaatccttgccaggtttcgtggcatcatcgtatttccagtaagcaagtattttggaattattccaattgtcaaaggtgataggatttctacctgatgtacctactaccagactgcttacaaaagtttcatctaaataacctttaaatttatctccaatcaaaaaatcagtacgtgtattaggtacttcattagggagagcacctacaaaacttattgcagtattgtttgtatccacataaagtttcgccgttccctgttcataagtcagcccaatatagtgccagcctgttgccagatcaggagtggtaacggttgcaaccgaacttccaatagacagtttcaaactattagctgtcgcacccatttgaaaagcaatgatcgtggagtttccatccattttcttaaagagaaaagctccgtccacccattcacttatatatatataggtaccaaaggtgaatttattaaaggccccatcagcagagtgaagtaatccatcaccgccattcataaaacttgttccttcaaatttaaccactccattacgaccttgaaaagtgcctgtatgagatacgtttgtcatcgtcgcatcattcaacggcaattcaaaagctacctcaccatttgcataaggacgcgctgccaaataaatcaaatctgtacaagcacccatactggctgccgaaatacggtttatttcaaaaaaatccccccgaatgtaagagcaattaatgaatgattttacagtaggatcatccggttcttccggttcaccaggttttcctgtgattgcaccttcaggaggagtaccagttggaacgtctacccattttgtgtctttacaagctgtcaacgttccaaaaaggaagagacaaagaaataggaatttgtttctcataaatttaataattaagattagctttatttaataattgtgctgtcccttttgacaatcacgatcacaaatgtaggctatattaaaggcaaagaatgttctattttagctacgattcttccaaatttgtctaaaatcgtccatttcatcgatatatctaaacatcatagacattgttggacatcttacgaatcaaaaaaagaaagcggaagtattcattcctgaatattcccgcctcttttatattttatcctaatataactacaacaattttcctacgaagatatattataggttttctatatcagaagattgaagacccgtgtatttgataattgtatcaatggatattccgtcctccctcatctttcgagcaatttcaatttgcttcttttgctctcctttctccatccctttctccattccttcctttattccttctcttatcccttcctttagcccttctttcatcccttcttcagccgcttttctccgcatctcttcgtttttacgccgttcatcctcctctacgatttgattgactctatatcgatctaatgccttatcataagcgatacgattttcttccgaaagatcggcaactgctgccaatctcgccagatgttcaaacacttgttctttcaaagcatccggcattctattccaattgctcatattcttcagtgcataaatcaatttatcatataatgtatggcagtccgacaagtcctttgtaaaataaggaaattgcaaataaatctgccggagatgcagatttacaatcttcccagtatcacggccggaaagaaccgtatccgtacggaatttagcctccaaattttccttacggatttatatagttcatatctaatttacgaggcaaaaagaacccctttatacaattaggattacgcacacatatctgaatatgattcttttctctaaaccctgcgtctggatagagttcaacaccttcccaaaatacacctttcactgaatcaaattctcttcctgatacttctctgttaatctgatgtgccgtttcaataactgcacaatccaatctgcgcaatagcttatcttcagatattcctattgtagaatttgtaggaagagaaatccctgttacacgacatgtttccacaagtacattataagattccttcaattcacctaaatacaatgaatctgtcaagtccatgcagtatcccaaatcaataatagcaccaattacagctgggcatttaacagatgaatgagctctacccatcatatcatttgcatattgcaatgcacgaagctcgttgttttcccaaaaatagattccatgtcccagccaatcataatcattagtacttgcaattagatcatctttaccttcaattatcttatttgcaattgattgatcacaaccatgaaagccaacaacaagattagaacgacgtgagtataatgtttctttcatctataaattttggtaagttcacctgatttagagactattccagctttttttagaaaagattgggcattccttttattagctgtaattttcttcactacctcaactctaagttcttcccgagtttttattttctttgtagcagtcattatatacctcctttcttgtacaaagataactatttaaatccataaacataaaaaacaatcccaaactttacggatttatagccttttatagtaagccgtctccctttcaattcctccaaacaaacaagagaaatgttctatttttcagattaagaaagaaaacaaaactattgaagatgggaatccggaattaaaagcatccatattatcacatatatatgcatattactgccacaatacagcatatattttcagataatatgcgttttctttaaagaaataaatgattttcctcggtgagcaataagccattcctcggtgaggaacacatccttcctcaccgagaaagccttccatactcaccgaccaagttataaaagcccttggaaaagcccgtttataggctagttcatcatcacatgcgcaccaaaaaagaatgataaaacaaactacatacgggcaaacaacaagcatatagatagcaatacagaggaattatttatttttagacaggaattatccaggataacaaacaatcctacattctttcatccaaaatgcagagcgttttttccttcaccacaaacaagtgactgatatattaaaaacagaaagaatagaatataccctttttcagatcagcacatttctaatcccatcctttcaacaaccatactctttcagcgtctgcatcaacttcgcgccattgatcggcttcaccagataatcatcacaaccggctttcaacgcagctacccggtcagcatcaaaggcatgagcagtcagggcgataattggaatttcagcattgaacttccggatctccgaggttgcagtacgtccgtccataacaggcatcttcatatccatcagtaccaaatccaccggttgggtacggacaatctcaactgcctccagtccattcggtgcgtgtaacaactggcatttgtttttcaagatagaagataccaaaaagaagttactttgtatatcttcaacgaccagtactcttttaggtactttttttgtttcttcggagtcaagaatattttctttattcgcatccttctcattgttccgacgtgaagaagtcggttcgctgttaaccgattcgaactggcatggcaaaaccgcccaaaataaagaccctttatcaaattctgactcaaagcctatctctcctctgcaagcctcaacaatggctttacaaatggacaatcccaatccggttccctgtgcaaattcatccagtttctcaaaacgatgaaatactttatcttttttatcctccggtatgccgatacctgtatcgcgaacgtaaagacgaatattttcgtctatcttctcataccccatttcaatagttcctttggaggtatatttgatagcattagttacaaagttagtgagaatctgcgctaaccggtttttatccaaacgaacggtacaagtttcataaggattcacgggaactaaccgaacctgcggatttactacacgacgatgcatcgaagcagctaattcgttgaaataaacagccaaatcaaaattttcgtatttcagttctaccgagccggcttctattttcgaaagatccagtatgtcgttaatcagcttcaaaagcaactcattgttggcattgataatctgaataaattcttctttttcttcttgatcttccgtcaccatcaataagtcggaaaaaccaacgatagcatttaacggtgtacgaatttcatggctcatatttgccagaaaggcggatttcaacttatcggattgttcagcgcggctccttgccttttcaagttcaccaatcatgtgctgccgctcggtaacatcatctacacgaatcacgacaccgtcaacatctccctgttcattaaatatgggagtagcaaagacttctatgacatgcttgttatccagattaaacaagatagactctacctgaccggatttccgggcacgttgcatcacacaattctcacaaggagtggtgcgattatgggctgtcagatagcaaggttctccttttttgtaagcctcataagaaaggcttttactacaaagcgagatattctcccattgtacgatatagtcgttcgcaatatatgccaatcccgaattaatattgttcaataccaattcattctgacgaatcaaatggatcattctttgttcgctctcaagaagttcttttttcgaacgcacaacctcttcgtaaagattatcatatttgttttgccacaaaacacgttcggtgatatcttgagttatcaccatataattggtaatttcagacttatcattatgtacaaaagaaacggtaatctcgaagaattttataccggacagattagtaggaaaaagacggcacaagtcatcaaaatcatattttgccatgaaacgcactgtttctccttttctgatctgttccttgatttcatcagagaaactggtgtagttgaatagattatagcccaaaatatcctttttgtcttttatccccattgatctcaaccgtgaataattgacatctatcatgaaaccgtccttatcatacaattccaagcctacagacaagtcattaaagatattatgcaataagttatcagctatcccatttaccaaagtctgttccatgcagcaaaatttgtatagtattacaatattgattgtttatccaagcaaagttactttaatattttgttacatagaaagaaagaggccttttagcctctttcagtatctttatttcgcattttggtataagaagccttctgctttcgctaatgtttccggtttgcctatatcaatcagatgcaacttttctgtcaagtaaccaccatagtttacttgccggcaagtggcaagatagaaatccatgatagagaattttccatcccatgagggagaggtcatccattgaaaaatggcgggcgaaagtacatggatgccactgaatgcatattcttgataaagggaagaatcatactgaaaaccttccggtttcacttgttccgtatccttgtttatccatccgcaaagtctcttatctgtatcaaaaagaagatagcgggaggttttacgttggctggccagtaaagtggcaacagcaccgcttcgtaaatggtagtcatataattctttcagattcacgtctgaaagaatatcgacattgtgtatcaggaaaggctcatcggagttttcaaagaaagaacgggctttcttaattcccccaccggtgtcgagcaacagatcgcgttcatcggaaatatgtatgataagcccaaaattctcattggcttctaagaaatcaagtatttgttcgccaaaatgatggatattaatcactatttctgtgaatccggcagctttcagttttaagatcacatgttccaacatcggatgtccggctatgggaaccaaagccttcggcatggtatcggtgaccggcttcagccggctacccaaaccggctgcaaatatcattgctttcattctttcggttactttcttctttaatatttactcttcttagattgttgcctcaaacgtatgttcgatattctgttcccgatgcaccagttcgactttcacaccaaatttctgattcaggtgctctgccagatgctgggcagaataaacagaacgatgctgtccgccggtgcaaccgaagcagacggacaaattgctgaatccgcgttccatataacgttgcacggaggcatccaccaaagcatagacatgatcgaggaaacggagtatttctccatcttcttccaagaaagtgattacaggttcatccagtccggtgaaaggtttgtaacgctcatacttaccgggattattcacggcgcgacagtcgaatacataacctcctccattgccggtagagtcatcaggaattcctttcttataggcaaaactcattactttgacggttaactgccgctttttcagatcgtccgtaaattgtttcagtccggtaagctctcgcaaaacgttacagagatacggatattccggatattcttctttcaacaattcacgcaggttttcgatggcataaggaacactttggataaaatgcggtttcttttcaaagtaaccacggaaaccataagctcccaacacttgcagcgtacggaaaaggacaaagtgacgaagctggctataaaaataggattcgtcaatcggttggtatttgcgaagagcttccatatactcttgcagcagttctttacgaagactatcgggatatttcgctttcgcttgccacaggaaagaggctatgtcataatagaacgggcctttgcgtccgccctgaaagtcgataaaccacggttcgccgtcttttatcatcacattacggctctgaaaatcacgatacatgaaagtagcggaagaactgcgaagcaagacatcgctcattttctggaaatcatcttccagtttatcctcctgaaactccataccggtagctttcaggaagcaatatttaaagtaattcaaatcccacaaaatggaacgttgattgaactccggttgaggataacaacgggaaaaatcaaatccatcggccccggcaaactgaatagcaggaagcagacgaatcgttttgcggagcaactctttctcctcttctgaaaagacactggtagcacgtcctttctctatggcatgaaacaatagagcatctcccaaatcttcctgcaaataataggttttatcttccgagacaatgcgaacttcgggaacaggcagaccgcacttacggaagtgccccgccatataaagaaatgcttcattctcatctattgaagccccgtagactccaatcaacggctgaatacccgtcaaccgaaaataacgacggttggaaccggaagacggtaattctgttatgttttcagcgggaacgcccgtatatgactgataaagtttctgtagttcttcagtaatcatagtcgtatattttcgagcaaagatagagaatctagttaaataatactatcttcccgctgataaaaaccgcctactttacctaatctgctgtgtacaggcctttacttccaataagccggttatttaaaatagttgttggaatggctccctatgaatataagatgaagaattagcaaatctcattgtattcaaagattttcagtgcagagattaaagattttcagtacagaaatttataatagtttatgcagtcgagtagtcatctctttataaggtgacgatagtcattttgtaaagtgacaaatagcaccctataagatgactattatcccattacaaggggacaaactattcttaaaaggtcggaaagctttaaagatacaaaattaaatagagaaaagcaagtaaataccactctcttacttgaaggaatgcaaaataagtttgcttttcaaccaatattcatccgaatgtattatctttgttttagtttaactgacctaatctcatgagaagaaagacctttttactactatgcatcgcatttatcacactgtttatcggcgtttcccctcttcaagccggtcattattactataagcaaatctcactaaaagatggccttccttccaccgtgagatgtattttaacggacaaacaaggttttgtatggattggaacccgctccggactgggacgatatgacggacatgaacttaaaaagtatgtccatcagtcaaacaaccctcattccattcctcacaatttaatctaccagctgatagaagatgtacaaaacaatatatggattctgacagataagggagtggcacgttatcagcggcaaagcgatgactttcttataccgactgatgaaacaggaaataatatcatcgcccattccgtctgcctgactgatgatggagtgttattcggttcgaaaaataaaatctttttctataattatcaggatgccactttccgcctcctgcaaacgtttgacctagagcccaattataatgtgactctgctaagtctatgggataaacgaacattactttgttgtagtcgctggcaaggactactcctgcttgacctgaataccggaaaatgccgccgtcctcctttcgattgcggaaaggaaataatgaacgtactcatagactcacaaaaaagaatctgggtagccccttacaacggagggctgaactgcctgacacacgacggtaaactactggctacatatactacccacaactcttctctaagtaacaatgttgtactaagtctcgccgaacgggaaggagaaatctggattggaacagacggaggaggcattaatattctcgacccggaaaccggacatttttctctgctggaacatgtgcccggaagtgacaactattcacttcccgccaactctatcttatgcctatacaacgactacaacaacaatatatgggcaggcagcatccgcaacggactaatcagcatccgggaagtttccatgaaaacatatacagacgtaccacccggcaacgaccggggacttagcaacaataccgttctaagtcttttccaggaatctcaagatcaaatctgggtaggcacggacggaggaggtatcaacaactttaatccgctcacagagaaatttactcattatccctcaacctgggaagacaaagttgcctctatctgtcagtttactcccggtaaattattaatttctattttctcacaaggagtatttattttcaatccggcaactggagaaaaacaacctttcaccattgtcgacgctgaaacaacagcactcttatgcaatcgaggcaaggctgtaaatctactccggaacactcatcacagcattctgttccttggagaacatatctatatatatgatttgaatacacgtactttcagtaccgctatagaacaggaagaacaagatattatcggtgctctcctgccaatcggcaattataggaacaccacttatctaaatgatacgaagcacatatatgaactggacaaccatacaaaccggctgaaagccctatacagatgctggaaagacacgaccatcaactccgtttcaagagacgaagagggaaacttctggattgggaacaattacggattggtacactacaatcccgccaccaaaatacagactccgatcccgacctctctatttagtgaaatcactttgatcgtatgcgaccagcaaggaaaagtatggataggagctgacagcatgcttttcgcttggcttatcaaagaaaaaaagttcgttctattcggcgaatcagacggcgtaatccagaacgaatatctttccaaaccccgcctgttaagtatgcagggagacgtctatatgggtggagtaaaaggtttactgcacattaactgcaaaataccattaacaacttctgaacttccccaactccaattatccgatgtcatcatcaatggagaatccgtgaataacgaattaaccaatcgaccaacagggatctccgctccctggaacagtaatatcactatccggatcatgtcgaaagagaaggacattttccgacagaaagtgtacagataccagatagaagggctgaatgaccagcaaatcgaatcgtacaatcccgaactggctatacgttcacttcctccgggaagttataagattatggcttcatgtacagctaaagatggcagttggattcccagtcaggaagtactggaactaaccattctccctccctggtatcggacatggtggtttattcttagctgtaccgttcttactgctgccgctattattgaaactttccgaagaactctaaagcgtaaggaagaaaaactgaaatgggcaatgaaggaacatgaacaacaggtatatgaagaaaaagtacgtttccttattaatatcagtcatgagctgcgcacacctttaacgctcatacacgcaccgcttagccggatactgaaatcgctttctgccgaagatacacaatatttacctataaaagcaatctatcgccagtcactgcgaatgaaaaaccttattaatatggtactcgatgtacgcaaaatggaggttggggaaagtaaattgcagatacagccgtatgctctcaatcaatggattgaacatgtatcccaagatttcgtcagcgaaggtgaagctaaaaacgtccgtatccgctatcagcttgacccacaggtcaatactgtaagtttcgataaagataagtgtgagattattctaagcaatctgcttatcaatgccttgaaacacagtccacaagatgcagaaataacaattacatcggagttgctttccgagaaaaatagcgtacgtatctccatcattgaccggggaaacggattgaaacaagtaaatacacaaaaactcttcacccgtttctatcaaggtacaggagagcaaagcggcacaggtatcggattatcttattccaggattctggtagaactacacggaggctccatcggtgcacgggataatcaggaagctggtgcaacattcttctttgaactacccttgagacaacaatcggaagagatcgtctgtcagccgaaggcatatctgaacgaattgatgaacgatgatagcaaagaacagttaccggaggaaaatacgttcgatacgagtccttacagtattctagtggtggatgacaatccggatttgacggattttctgaaaaagtcactgggagaatatttcaaacgggtagtgattgcttccgatggtgtggaagcccttcaactgaccagaaatcatgctccggatattatcgtcagtgacgtgatgatgccgagaatgaatggatatgaactttgcaaaaatataaaggaagatattacgatcagtcacattcctatcattctgctgacagcaagagatgataaacaaagtcagttgagtggctacaagaacggggcggacgcttatctgactaagccctttgagatagaaatgctaatggaaatcattcgcaaccgattgaaaaaccgcgaatctatcaagaaaagatatttgaatacaggattagtccctgcgccggaagagagcactttcagccaggcagatgaaacatttctgctgaaactgaataaaattattcaggaacatctggatagcagcaatctggacgtcacttttatctgcaaggagataggtatgagccgggcttccctttacaataagctaaaagctctgaccgatatgggagccaatgattacattaataaattccggatggagaaagcgatcacattaatcaccagtacggacatgtcgttcacggaaattgccgagaaggtcggcttcactacttcacgctatttcagtacggctttcaaacaatatacaggagaaacgccaactcaatataaggagaagagaaaacaggaacggaaaaaagagtaatgagcagctacccgaaaaaacaaatattctttaggcacggaattctaagacctgagcaaataatccgtgcctaaaaattttaatatactgcaagtttcattacttactcaaccattgacttttttatagtcttccagaaacttcttcaatcccgaatccgtcaacggatgattcaataaacccttgatagcactcaacggacaagtagcaacgtccgctcccacttccacacattcgataatatgtttcgtattgcggatagaagcagcgagcacttgtgtcttgtaatcataggtacgatacatacgtacaatatctcccacaagccctactccatcttcacaaatatcgtccagacgaccgacaaaaggcgaaacataggtagctccggctttagctgccagtaatgcctgtcctactgaaaagactaatgtacagttagtacggattcccttttccgtgaaatgtttgatcgctttaatgccatcggcaatacagggaacttttactacaatatgcggattgagcgcggcaagttcttcaccttcacgaatcattccttcataatcggttgctatcacttcggcactgacatctccgttgacaatcttgcatatcttgatataatgttcacgctgattctgcgttcctttgataccttctttcgccatcagcgaagggttggtagtcactccgtcaagtactccgaggtcataagcctcctgaatttgctccaaattagctgtgtcaataaaaaatttcatactcttaatttttaatggttaacgatctaatagtcaaagataataatttatttccattcatctctgattatgcaatcgttattgacgaatcaagatatacatcctgaatagtattcaataattccaccccttcgttcattggtttctggaacgctttacgtccgctaatcaatcccatacctcctgcacgtttgttgactacagctgtaatgactgcatcacgcaaatcggaagaaccgtgagattctccaccggagttaatcaaaccaacgcgtcccatatagccgttggctacctggtagcggcaaaggtcaatcggatgttcggaagcaagttcggtatacatacgctcgtcgatctttccgaaaccgatagctttgaagccaccattattagtcggaagtttctgtttcacaatatcagctttgatagtcactcccaaacggtcggcctgtcctgtcaggtcggcggcagcatgataatcgacagcacctttcttgaaatcattattgcgcaggtaacaccaaagaatggttgccatccccagttcgtgagcatattcaaaagcttcggctatctccacgagctgacggcgactctgttccgaaccgaaatagatagtggcgcctaccgctactgctcccatattccaggcttctttaacggtaccaaacaatacttggtcgaaactgttaggataagaaagtaattcattgtgattcaacttaacgataaaaggtattttatgggcatatttacgtgctacggatccaagaatcccaaaggtagaagctactccattacagcctccttcaatagccagttttacgatattttccggatcgaaatagatcggattgggggcaaacgatgctccggcagtatgttcgatgtcctgatcgacaggaagtatagacacataaccggtatttgccaggcggccatgtcccaacaacgtttgcagactgttcaatactctgatgctccggtccgaatcaatccagattttatctattgtatcgggagacggaacatgaatcaatgatttatcaatggtttcgcaagtgtggtccaggtaataacaggccttatctcttaataattctactactttactcataacttctttttttaatgtgtaacttttctattttttctttccctgattggctactgcttccatcagttttttgatctcttccgggtttcccaggaaatagtcattagcaacgttcaggttttcatcaaactcaaatacgtaaggcacagccgtaggtagattcagcttgacaatatcttcatcggagatgttttttagatgcttgatgatgcctctcaaactattgccatgagcgaccaccaacagcgtatgagctgttttcagactaggaaatatatcactttcccaataaggcataatacgttcaatggtatctttcaacgattcagtacgaggcaactccgcatcgggtacttcatgataacggtaatcaaaacggggatttctcaaatcactttctgaaagaggatggggagctatatcatagctacgacgccacactagcacttgttcttctccatatttctcggcagtctcggctttattcaatccctgcaattcaccataatgcttttcattcaagcgccagcttttctctacaggtatccagtccagattcatcttatcgagaacacagttcaaggttttcaccgcacgcttcaaataggaagtataagccttatcaaaattgaaaccatattctttcaatgtctctccggctttttcagcttcggcaactcccttttctgtcagatctacatctgtccagcccgtaaaacgattttctttattccatgcactctctccgtgacgaagtaatactatctttttcatttctaaaattctcctttcttctttttatatatacaacagattgtttcttcacaaagttcactagaaaataaatagttgtcaatacccagaaataatgattctttctacaaagaagcgggatgcagtaatcagggatataaaaaaataccctcctctaattctaagcttgcattatggatgatgattcatcaaagcaaggttatcattagagaagagtaagtctgtaaaagtaaaaagagagagtttatatatacaagaaaatctgttctacttttctatttttttctattcttcgttttcctcaaagctatttatcagaagaccgcgtatcagcatcttttccataatatccttcttttattttctgaacgttgcgcagcaatgccgcataatgccggtaattgagatctccctccttagaagcagcaagttgctcttttactgactcttcaatcttatctaaatgctgttctacaaaaagctgaatatcagaacggctgattgccagatttgcattggcaccatctttgctactaggtttaatcattccttcgacaaaccccagataagtccggtgcaactgacggcggaaattattctccagttcattgggatcattcaacggtttccatattgcagtaaatacatcgttcaaataatcatcgagtgcatacgattccgaagaacacaatgaggttgagtaaatattatacaacattcccggtgcaagtagcaaagctacaacagagctttggcggtcacgaatctcatccaccggtttgactccggtacgactcaccacttcatcagggtagagccagagtggagctacaaacaaattgcgtcccaaccattcaacagcttctttctgcaaactgcgtggcagataatcatgcactttgagatccggcaaattattggtatagcgtcctcctatgttcttctgcacttgcagggtatacttcagatgttgggcacgaaccgaattataaatggtggttaagtcagtgtactctccgtcaggctgtgctgtccaggtcagtatgttttccatcactcttttcaggttctttataccgtattcattggctttcatattattgtcgcccaagtcctcactctggctacggggatcaaatccctttccttcatcaccaacaaaccacaagcgatgatctccccgcagttttttggttacttcggcacgtaatacgtctttttctttataaggatccttaaattccggacgatagcgatatccccattggatagcccatttgtcataaacaccgatacgagggaacaatcctttttcggaaatccgatcttccggttgggctacataattaaaccgcgcataatccatgattgataccgtatgaccattggcttctacccaagctttatcacgcagtttctctaccggagtagccgaactggctgccatattgtgccgtaagccgatactatgccccacttcatgtgaagagacaaactgaatcagactgcccattaatttgtcgtcaaaagtcatcgtgcgtgcgcgcttatccagtggcccgcactgcaccatataccactttttgagtaagttcattacgttgtgataccaacaaatatgactttccataatttctccactacgcggatcgacaatacgcggaccgtaagcattctccgtttcggagggtagataacgtatcacactataacgcgcatcgtccaaactcatattgggatcgttcggccattctttagctattatagcgttcttgaatccggcagcttcaaatgctgtattccagtcttcgacacctgctttaagataaggtatccacttcttcggtgttgccggatcaatgtagtagataatgggatttttcggttcggagagttgtccccgacggtaacgttccggatctttcggttccaaccgatagcgctggatgatggctccacgatcggtagtctgctggtcgtccgaaaattcggtcaacgagttttggaaaaatcccacccggtcatcggcaaaccgtggctgcatcggttctttgggtaacatcacgatgcttgtattcagtttcacagtcaccgaaccagtctgtgcagccggtagtctaccagcactaatactataagtacgcaaagtcactgcctccacgttgataggataggtttttatcgtatccataaatgtgcggtcctgggctaaagtaccaatgccaagaatggaacggtcgcttgaggtaaagccacacaatttattatcacctaaaaagagttttgatacatcaatgagctgtgcctgagtctccggatttctaccgattacatcaaatttatagattacaggatctacagtcgattgtttcaatgcctcggcaatgttatcacccggacgggcaaactgtgattgcacatattcgcgtaaaaagagagtcttatcatcatgctgttcccaataaacaacactccggttcacctcttctccgctaagcattttgaaaccctgtggcactgctttaaaccgggtcacagccaacaacaaccgtcctaaaagagtatccggcacttcaaaataccagttatctttgatgtggcgtaccgtaaacataccctcagattcacttcctccatctttcaacagtttttcataagccgttactttcttaacagtgtctttcttgaccgtatcttcctgtgctaccagtttcttctttccactttccagaagagatataccactggcacgagctcccacaccttgcaaggacaggaacgccaacacagccatcatcaaaatctttcgcatagttttctctttatttttttcattcgttagtgttcattgtcaggttcggatttttttcacgggcagccaacgggaatggaatgatatacaaccgtgaatccggcttcaacgtatatgtctttttctcgacatccgtagataccagcgggaaagtacgggtgattgtctttgcgtaatcagcttccgtattgtatcgtttcaaatcccagaagcgactaaatccggagattaactccttacggcgctcatcaatgactgcctgcaccatcgcacgttcggtagcaggttccggcaatacagcttcggctcccttgattcgtttttcacgcaactgattcaatgtttggacagctcccggtatatctttcagccgtgctttcgcttctgccagaatcaggtaaacttcggcagtacgcattcccacagacataggctgaaacttagaataagtaatcgaagtattccacaaagcagctcctgaaccttcgtcaaagtagtatacactgttgtcactcgttttaaagaattggttcaaacgttcatcattctgcccgaaaagttgtaccatctccgggctaagcataccataacaaaaggccaaaacttcagtaggaccacccatataagcatagttcagcacttccgggttaccgcctttggcataagtagtaaccttagtcggacctcctttagctcccaaatcaatataatcaatcagggtattattcaacttcaatgattcttcggcagcttctttcgcttttttccaatctcgatggaacagataaacacgggcagccaacgcatatccaaaagcttttgacggatgatatacattcaccggctcttcctgtaaataaggaagcgcttcttctatatccttaataataaaatcgtatacttgagcaaccgtagatttggttggagtagcctccaaatcatatttatcaatgatagcaactccaccgtcagtggctgcagtttccggattatatgctttcgcaaatgtatttatcagaataaagtgatcccaggcacgcatgatctttgcttccgcttttgccaattccttaacatctttatcacccagactagcatcaaccaatgaaattacgatatttgaccgtaggatatatgtataacaattttcatataaattgttatcacttagctctttccggttagctgcctcattaaaagtcatgttaataccatcccatgaaataaattcattacctatgatattcgattctttcgaccagacattatcgctcaacaaggcaaaagctgccggatggtaggcccggttgggcagggctatcaattcataataagtatcagtagaatccaccgttttcttgcctgtaggagtaatatccacatagttttcacaggctgcaaaacccaatatgagaataactggcaatatataaagtaatttacgcatatcttatatttttaaaatggttagaaacttgttgataatccgatggagtaagtcttgggagaagcgatgccacgtgtaccgtcattcattccatagctttccggatcaatatcacttcctgccttacaccaggtaaacagattatttacctgcactttcactttcagagaagagaggcggaggtgttggcaaaccgtaaacggcaagttatatcctacactcaagctacgcaattttacataacctgcatctttcacattgatgtcaccgtattgccaccaatcttggaaagtgctggcataagtttttacctgtgccggtatatcgaggtacatacgtacctgtgcattcgaatcatccgcagtccaacggttggcaattcctttcaaggtttgagtacctaactggtcatccatttttaatacactgttacgcagcttattaccaccagcatacacaaagaatgcattcaaatcaaaattcttatagttgaatcttaaccccactgacccgctgaatttcggagtcagcgaaccaaggttcaccaagtcatcagtacctttgagcgaagaaccagaagtgatactggctaccgtgccgtcttcattaaatttcaccagatcatttccatctttatccactgctaccggatatccattctcgatacgatgtatacggtaagcccataacgtattataactagtaccttccataaaataaacctgcggacttgcgataaagactcttgcattatcagattcactatgatcgactttcaacattttgttcttattatagtcaaagttaaaatctacagcgaagttccagtctttcttacgtatgatattggttgtaagggaaagttctacgccacgattacgcatctcaccattattcaccacacgtgaaccggctcctaaagtagggtccatatatcggcgtaccagcaaatcagatgagtgacgattgtaatattccagactaccgcttatcagattcttgaaaagacggaaatctaatcctatattgtaggtggctgttttctcccaacgaagcttcggatttggcaaatcatcatcctcataagtcagataggtcgttttaataggattactttgcgtttttttctttacaacaaaataggtagttgagctttgatcgacattaccgttgataccgtatgtcatacgtagtttaaggtaatccagccaggaaatctcttttatgaacgattcttccgataaaatccaagaagcaccgattgaccacaaaggatggcgctgattgcgtatatcgagcccgaacaagtcagcttgatcccaacgtatacttccggaaagattataacgtgacagataagagtatcctgcatttgcataaaaagacgcataacgatggcgtgactcgtgcaaagtagcagacagccccgataaagtaattgttctgccagaaagagcacttgttcctacaccgtcacgataggtctgccagttcataaaatcagaagttaatgtctgcggatcgtagccatacaacaattggcgggcaggtgtcggaatcttgttttcacgaaattccagaccggcaatggcagttactgcatggtctttccaagttttgtcaaagtcaatctggtttcgtaccgtgtaacgcttactttctacttctgtctgattaaaacgtcccccttgcggcaattgtgcttttccatttgtatcaaccatactgttatatagcatacgcattacataagtattttccgactcaaatagttcactcttacctttattccattcatactgatacatgaagttgtatttgaacattttcaggaaacgagcctgtaaacttacaaacggacgaatactaacatcatgtgactttgttatgctttcctccaatgcatcaagtacattgaaaccaaacgttctataaggtgagacaccttcagcttttcttacaacactcccattataggaaggagatgtatccacattcacgtaaggagaagtataatggttaccatcggcatccaatatccgttcatatcgctgttgcagggtgtagctagtataaccgctattcggggtataactacgtcccatacgtacatccactccggcattcaggttcagccagtttgtaaccgcataattcgatttatagtataaagaaattttattacttttgccactgataacgcgctgactatccttttcataattgaaagaaaggagatggttgctatttccggctttctgtgatacggttacattatagcgctgggttatagccgtacgccaagcgttatcacgatattctttataataatcattattgcaccattgcctcaacgtagcatttacttcaccactggtaatatccccattggcctgatccagataaagctgaaacaagggattgtaataattatactcaaaagaagataaaaaattcgccgcacttcctttttccgctacattggcatcaaaaacagctgtctgataatcaataatatcacttgttgaagctaaattcaaactcttgaaatttggtttggtagtgataaaccagtctgcattaatgctcacgtgcgcaccttcttttttagcccgcatcgtggctaccacaataacgccattggctgccaaagcaccataaatactggcagcggcagcatctttcagtacagtgatactctctacattatacggatttatctcgctcaatctcaaattggttggcatatcgtccacaacaatcagtggttctgttcccacatcatgcgagaatgtacctaccccacgaagaataggactcatatcacccgtattcgaattgatattcatacgcaaaccagctacttgcccttccagagatgaggccagatcactgtgcatctgtctgttcagttgctcggaatcaacgaaaccgaaagcggcagtagaacgttcacggctaatacgctgataacccgtcacaataacatcacccaactgttgcttgtcctcatgcattatcaccctgacgttgttacggtctttaacagaaaccttttccgactgcataccaacgaaagacacttccaatgtatgtacatcgaccggaactctacaagtaaagtttccctctgcgtccgtaatagcaccaaagggactgttaagcacctttacatttgctcccggcaagggatcaccactttcatccactacctgacctccaacatttctgaacttgcctgaagcagttgtcgaggtagctttcactttacggacagtgatgaaattttgtttcacatcatactcaaaaggctttccttccagcatcttctgaagtgctgcaaaaggagacatctgatatatactcacagttacacgatagggtgcaacgtcttcactgggaaaattcaccttataaccagatacattgctgaactgtttcaaggccgaaccgagcggttcgtttttcatctctaaagaaatctgcctgttttctgcattctgcgcccatccttgcaaggctgttgctgtaaacaccagcaatagaaaggcagttctcatccacacaagcttttttttagttcttttttctaataatgtaatttgttgctttttcataagagttgtatttgtatagttaaatctgcttgattgtaatggtcccgtcctgatagtccacctgcactttctccaacttattcagcagttccaatgcttcatccaaatgggtatttttattagcccagaagttcaacctgatatggtacagttcgcaccgctcaaaatcgatattcacattataccatcttcccaaagcacccatgatttcttccaacggcacatcctcaaagtagaacattccctctgtccaggctgtatatgtagcgatattcacttctgatactttttcctctccggtttccgtataggtcaaatcctgtcccggacgtaatgttaccgacttattgttaactgtgtttgtgacctgcaccttaccattcaccaaagttacatgacgatcttcaacactataggaacgcacgttgaatttagttcccagcaccatggtattcatgccattagcacatacaataaacggatgttcggcatcttttgccacttcaaagcaagcctccccttctagttccacacgtcgttcttttccatgaaatgccacagggtagcgcaaacgactttcagcattgagccataccttagtcccatcagccagtaccagcagaaaatcttttccacgtggtgtagtcaaagtctgacagcatacagtgtctgccgagacagttttccagtctttcacatccatcacactgtctgtcaataactgctgttcactacgaccatccatttgtaggaccacatgttcatcattgttgttcgcagcaaaaaaacgtatcggctgttctgcaggtaaagaagtggaaggaagcaaagaaggaatcagaaaagccagtatcaagacagctgcaacagaagaagcaattgccaagatacgcattttctttctgtacttgcgtttccgttgcagattctcacgtatcacagcttccttacaagccattaattccaagaaaagttctttattttcaggtatacctatccactgaagaaattcatcagtttctcttaattgtggatgttgtatggcacgaagtgcataatctaattttttatctgaatggtctatcatagtgtcaatagtttcattaaacacgtaaaggttactgaaactgatgacaccccgataggattttttttaaaaaaagatggttaattgttttcggagtatctttaaagctctggcaatgtgcgttctaacggtattatcactaatacgtaacttttcactgatttccgcacatttcttttcatttaagaagaattcttccactacggttcgcatttgtggagccatctggcgaatactctcctgcatccggtttatcttgtcttcatactcacggtattctttcacagtccagccactgtaaagttcttccagatatctttccgcatttttatgcaccacgttctgatgacgtatttggtcaatacaacgatttcgcaccatgacgaagaataacggcagcagatcctcttccgttgtcaaccgttcgttgctctcaagcaccgaacaaaagacatcgttcaccacatcttttgcgctttcctcatcattcagcagattatatgcatgaatatagagtttttgccaatgttccctgtatataacagttatagcattttgactattattcatgtatttatagttactttttgcgtttcatagagcgcaaagataaccaattggagcaaaaaacactctatttattaaaaaagattataattcatataaatacatttgttgttatagacatattctattcccatcgtctgactctttatattttgacactatgtttctctccagaaagatacgattcacaactatatccggccgtttccattcatctggacgttgatttaatcttcgctttatctttacgcgtacagaatgcttcgattactttttttacacgaagataatttattgatactctgctcatatatgcccattttctttgtaatacatactttccttgtgatacaatcatactatcttttacttttttaaggtggaattcaacaaaaatgattatttttacgagcaaattattgtctaactacctgataatacagacataccttgaaaataaacgaacaaaacgaaagcgaattcctacaaaagcttatgaacaaagcgaatataggatggtgggaagctgacttgaaagcagagacttacaagtgttcggaacttatctcccaactactcggaataggagaagacgggctcatcagtttcgaagatttcaacaagcgtattctaaaagaagatcagggatacgcaacttttccgtcttttgacaaagtacaacagactgtagaagaaatatacttgtttgatactcccaaaggtcatgtatggattcgtagcaaggcatgcttccaggaaacagacgaaaatggtaacaccaaagtatatggaattgccgaaacccaagagggaattcatatagcatctgcacaccaggctctacaaaatagcgagcggatccttcataatatatataagaatcttccggtaggcatcgaattatatgataaggacggtcaaatggtcgacctgaataaaaaagatatggaaatgttccgaatttccaataaagaagatattttgggagtcaacattttcgagaatcctatattgccggaagagataaaacagaaaataaaagacaatgagaacgcagattttacattccggtatgacttttccaaaatcaacaaatattatcagcctaacagtacaaccggtttcattgacttaacaaccaaagtcaccactctatacgatcacaatcacgaacctatcaactacctcttaattaatgtagacaagaccgaagatacaattgcttataataagattcaggaattcgagagttttttcgacctggtaggagattatgccaaagtaggttacgcgcacttcgatgctttgagtcgggatgggtatgctttgagaagctggtacaggaatgtaggtgaagaagagggtaccccattgccggaaatcatcggcattcattcccatttccatccagaagatcgggctgtgatgatcgacttcctggataaagtgataaaaggagaaagttccaagctatcccgcgatgtccggattcgcagagcagatggaaattacacttggacacgggttaacgtattagtaaggaattaccagccccaggacaatatcatcgaaatgctgtgtatcaactttgatattaccgaactgaaagagacagagcggatgctgattggcgccaaagagaaagctgaagaagccgaccggctaaaatctgcttttcttgcgaatatgagtcatgagatacgtaccccgctcaatgcgatagtaggcttttccagtttgcttgaggaagcggaggatgcagaagaaaaacatctgtatgcaacgattattgaagaaaacaacaagctcttgttacaactgatctcggatattcttgacttgtcaaagattgaggcagggactttcgacattatcccggaacaagtggatgcacaacaactttgcaacgaactgctacaatctatgcaggtaagggctacagagcaagtagagattctcttagcaccggaactgcccgagcttacttttaccagcgacaaaaacaggttgtatcaggtattgctgaattttgtaacgaatgctctgaaatttacttccgagggcagtattgttattgattaccgaatcaacggaaatgaagtcagattctcggttcaagatacaggaatgggcatcgaaccggaaaagcaggaagctatctttacccgattcgtgaaattgaataattttattgccggcacagggctgggactccctatctgtcaaagtatcgtcacacagttaggcggcaaaatcggagtggaatcagaaccggggaaaggttcttgtttctggtttacgtatccgattaactaaaatctaaattcaaaataaatatcagaaaacaatgtttaccggtttctctttaagaaaatacgatctgttatagtgttgggaagttccgattcataatgtgtcaccataatcatcgtcttatctttgcgtcggcagaaagcctcaatcactttctttacccgtcgacgattataagtatccaagccatgaagcggttcatccagaatcagcagttccgggtctttgacgaaagctcttgccaacaaggacaaacgttgttctccactggatagttgcaggaatggtttatctttcaaatctgcaatgccaaatatatccatccaccactcacagatagccatctgttccggttgaggacgtttatacagaccgatactgtcatgcaaaccactggctacaatctcaatagcgggcagatttttaagataagcacggtgcatctccggacttacgtaaccaatatgtttcttgatttcccaaatactttctcccgtccctcttttccgtccgaagagactgatgtcacaggcatacgattgcggattgtctgcacagacaaggctcaacagagtcgatttcccagcaccgttctcaccactcaacgcccacttctcaccacgacggactgtccagtccagttctttcagaatagttcggtcgccataacggatactaaccttattaagttttactacttcctccgaatcgtaattgttgccatcagatgacaaatctataatccgttgctgcaaatcatcaaaagaggtaaccacatctctactgcggaaagcttccagataggcttcacgttccattttaggaaagacctccattttgtccacaggaatgacatgagtgatgaatgaaggtatatcatcgagcatggaaagtaccagaatgatctgtacggacgacatttttgtcagacgttcgagcaaagaaaacaacagttcacgcgtaggagcatccagtccgataaacggattatccataatcaacacgcggggagcagtcaacagggttttggttagctggaatttacgtaattcaccgctggaaaggagaataattttcttgtcgagcaacggttcgatacggaagagttcaaacagttcgcgttgtagttgctcgtccttgatttctcccaacatctcacgaacatcaggagcttcatcctgatcgtgagcattccaacgctgctggtagtagtaattggcatcggcagctccataggtatcacggaaagcaatgtatttcacattatcataaagagtctgggtggcagagggggaaaaatcatattgtacggttccttcacgcaatggatattttccgatcagggtatctacaaaaagacttttaccgccaccattgggacctacaatagctatgtgttcattcgctccgatagttgccgtgatgggtttggctaaacgcacaagcgggttgcgtgctacgccccccgccatgcagaatgtattttggttcatattcttttattctgttttattattgcccgcaaaggtaacaattttatcataaaagacgccaaattgcaaacatattcttattcgttccgtagaaggaatatctttatttacttactaaacccataaggtggacattcaaaattggtaatatccaatttgtattccatcatatctttcaactcgtgtatgggacgttccaattcgtaaggtatcgattgtctgctgaattgctggaagtaaagcaaacaagcatcccgccaccagacagcatcccgtgcctgaatcttcaggcggtgttgcacatcacgaaaacgttcggaatcaatatacggttccatcctgtcccacactttttgaaagtttctcacttcgtttacaccacgatcatacgcgtagcacagttctgcccaaagtgtacgtccgctcttcatctgatgattccaagggacatggtgaaaccaaaggagcagattctccggacaagtattcacattgtccagttgctcgcataatggagaatggtattgtccggtagcattacttcctgtactgctgcggtcgaaacctattcccatgttgtcggcacggtggtaataaggaggcagccaatccgggcgggcatcgggaatatcacaccagggttccggtccgtaatgatgtccccatgcaaagatatgatgcaagccgagaggcatcatgtagtctactactgcttctctcgatttctgaagcacttgggagttgagaagggagagttgagcgtcgatctgctctttttgaatgacttctcctgccggagtatcggtttgcgcaccggtaacgggaagaaaagtctgtttcaaccattcttctcctatctgttcggaagagagcgaatgtttccatgccaatcgtccgaaagcataccagttggcttgagcaaaaggatgtccacaccaattagtatcatcaccgatgtttgccactccggaaatagccgtgagcggatgaaagaataaagaaccatctgtcacacgggcaacggtagagcctttgccttgcagataagtatcactgtctaaacactctttccacataggagcaaggaatgcaagatgattggaaaaaccaagatactcttgtgtgatttgaaattcgggcataactgccgtctttttcatggctccgaacagcgggctgaatggttcacggggttggaaatctatcggaccgttcttgatctgcacaataacattatcccgaaatttatcatccaaaggttcaaattcaagataggcttgtttggcacggtcgctgtcggtaggagaataaacgaaagcgcgccacatcacaatgccatgataggacctcaacacatcggcaagcatattggctccttcggcatgagtccgtccgtagtcacacggaccgggctgcccttcggaattcgctttcaccagaaaacctccgaaatcgggaatcagagaataaatctctttggctttctgcttccaccagtttatcacttctttattcaacggatcggaagtggataaaccgcctaaagctgcgggagaagagaaattgatagaaagatatattttcaagccataagggcggaaaacgtcggccaagactttgactttctgcaaataatcattagatagtatcttaggacttgcattgacattgtttattacagtggcattaatgccgatagaagcattggcacgagcgtaggcttcataacggggagagacaacagacggaagttcgtcccatttccaaagtgaatgtccggcatatccgcgttcgattgtaccatccaagttatcccaatgattcaggatacgaattcgataatcaggtcgttcggagatattgagggattgcaaagctgattccggtagttgtccggtagcttgcagacggagtaaatgatacgttccataaagtactccttgttcaccggaagaagctatcgttatttgattgccacctttggaggtctgaatcgtatatccctcatttccaagtgcacgaagttctttattgttccggacctccaaagtaaccgggattcctccctgccagaagttctgtaattcggaaaccgcaatacgtaatgtaggtgattgtttcttgctggtaatttccgctttcgctcccgatgcataacgaagccacaaggcacttccatcttctgcccaaatagaagaaaagcaaaaaaacaaagtgaatgtcaatgcaaatatatttctcatagtacaaagtatgttatcacaattaatttacagtatgatagcataagtaaattaagcattcatagttaataataaccgcctctacctgaaaaatccctattacctaatattctggtaaaagtaggtatgtttttcaaatagaggcggttgttttaatgtatcctattattcatcttttccctcgatagtaatgattcgcccgtctgcatcatactgaagttcacagactttcaagctacggagccaagtctttccctctgatggtacacaatcgtgatgaaacagataccacttacctttaaactctacaatagcatggtgagtagtccatcctaccaccggagtcagaatgactccctgataagtaaacggaccataagggttatcacctgttgcatagcagagcaaatgagtgtctcccgtagaataggaaaaatagtatttaccattatatttatgcatccacgaagcttcgaagaaacggcgttccgtatcccctgctgtcaatggcttaccgtcttcatccagaattaccactgcacggggttcttcggcaaactccatcatgtcttcactcaaacgagcaacacgcgacgggattgcctcctcctctccttccggaaaaatggcagattccaaggctttattattacggtaacgttgaagttgtccaccccacaatccaccgaaatatatataatagttaccatctccgtcatcccatacagccggatcgatgctgtaacttcctttcatcggattagcttccggtataaaaggaccataaggtttatcactcacagctaccccgatacgaaatatatcattctgatctttcaatggaaaatacatatagtacttaccatctttacaaaccacatcacaatcccatagttgacggcccgcccaaggaatatcctctgtggaaagcaccactccatgatcttttatttcaccgttcatcacatcatccatagaatacacgtgataatctttcatattgaaatgatcgccattatcattttcagcaataccactttcccaatcgtgcgagggataaatatacagtttgccatcaaatacatgtacggcagggtcagccatataatcaccgggaactaaatatcttttttctgttttcatgctttttcggtttttctgttagaaacttattttgttttttcagcctctttgataatcaggccgactaccggcttcggctgataattgcgatcaaaaagtaacggataatccgtgcggcctctcatcggccagtcattacgccaagagttctgatcggctactccccaaagagtaaccctggtgatgaggttatgatgtttcaggaacagacggaaaaagtcattcattctttcagtccatgctttcgatacctcttccggtaatccatccggataaggattcatctctttcttatattcaaaggaagcggaaacttctgcacctacattgggattcggtgatggtatcaccgtcaaatccagttctgttatcattatcttcactcctgttccggcaaaggccagcatactcttctcaaattcactgattttcgggtagtccatgccgatgtgtccttgcatacctatggcatcaatacggattccacgttttttcaaatcgttcaccattttcacgacggcttctcttctccccggttgggccattgagtagtcattgtagtaaagttcggcatccggatcagcctcgtgtgcatattggaaagccaatgggatatattcttcccccagaatctcataaaactttgtcttgcgatatgctccattatcttcaatcgcttcatttactacatcccagcctttgatacggcctttatagcgtttcacgatggtagtgatatggtctttcatccgtttcttcaggacttccggagaaacattattcccgtccttatctacgcaaaaccaaggagccaattgtgaatgccaaatcaggcagtgaccaatgatagccatttgattgctctcaccaaaactgacaaattcatctgcctgcgcaaaattatacttattttctttcggatgaatgacagaagacttcatgcagttttccgccacgatggaattaaaattcttctttacaatttcaacagctgcgacatccttaccggaactttgatgtgtgttcactgacacgccaatcaaaaacttgtttttcaaagcctttttcagcgaatttccatctttcgcaaaaacttctccataagaaaaagaaaacatcactgtcaataacaacagaattattcgtttgagtttcatacgttatatttttgagtaataaacattctactatcttatctattcgccttttttacagcgcgattctatctcctcatttatattgtcaatcacattatcttccaattcatatttagaaataatgaacatagcgaccaaaagcaacaacgccggaataacggctacgagccacagtattccctgttcggcaaaaggtgattgtgacacttcatttgtctggtcgaatccgacaaaagccataacaagtcccggtacaactcctccaagagccattcccgctttatagaaaataccagtcaaagcattgactatacccgaaatacgtttaccatgagtatattcgccatacgaaattacttcgggaaccaaagcccacatataccctgtcgcaataatgactcccgtcgattttatgaactgcgccacaaagaccaaccatatctgcgttttgagtaccggaaccacagaaataatatacagcaatgccatacccaatatagcgactgaaaggaatacataaaacatttgcttttttccaatggcacgtttaatggcaggtaccatcggcatgaaaatgaatgcgggtatcgagcccaaggccatgaaataaggcaacatctccggtgcacgtacattataaatcatataatatgaaccggcagaattaccaatcgccatcattgcaaaagcagtaatgaaaaagaacgccaaaatacgcaaaggtttatttctacaaaattctacccacaagtcggacacttttactttagatgtctcctcctgatccataaccacacgctccttcgtctggctaaagcagaacatcaataacgccaatccgataacagcataaatagtcatcgtaataaaccatgcgttagcagatgcagtagtattgattttaccatcgggagacaacaccttcaccagtatcggaataccgtatgccacagccaaaccacccaaattggcaagaaacatacgcactgacgtcaacaccgtgatttcattcgtatcgcgggtaagtgacgcattcagtgctccataaggcacattaatcaatgtataacacatggataatccaacgtaagtgaaataggcatagaacagtgaacccgaaaagccgttccaaaaacaaagaatagcaaaaccagtcagcggaattcctccccaaataagatatgaacggtatttacctagtttaggattgtgtttatcgacgaaagcacccaccagaggatcccaaaggacatccactatcctgacaataagaaacatcacggctgccacttccggtttaagtccatatacattggtataaaaaatcagcagatacatacatacggtctggtaaataaggttttgcgccaaatcaccggaaccgaatcctatacgttgaagccaagagagtttatagaaacctttcgcttcattggtctttattgtattctccataaaatagataaattggtcattttctgtttttcgtattcatttctatcaagatagctgctgccactcgttgccctagcgtctttttatccaatggatgaatatcattccattctcctaaatcactatttttaatcagagtaacatttttatttgtatcggctacttccgcctgcgctttccggaattccgcccaggcagtgcgtcctcctttatctgtgggtgaaaggaaatccgccagctcaatgatatagaaaggcatatccgacttattccatcgctgtctccaatcgctaatcatagccgtcaacaagtctttatactcatttctgcgtgagacattcgattctccctgataccagatgacaccggataccgtatagttcagcaaaggagcaatcattgcattatacagtcctgtgggtttataatgaaaagccgtttgtcccggagcagcgggcataggagcaccgagatgatatttccaactcccctccaaattgatctccgattctcctttttccggctgaccttttccgaaaaggattttataaggcttttcctttacaaattgaggacgaccgccataactgaaaaggcgtatggttattgtattttttccggctttcaacaatccggcaggaatggtgtagatacggggaggatactgataagagacagtccccacaaatgtgccatttacatagaccgaatctgcatctacgatgcatcccaaacgaagagtcgctttctctcccgcctgttgtgcagacacctgaaagtctttacggaaccagtgggagccattgacagtattcagtccgtttgttgcccagccggaagtaaacaaatctgtttctgtccaattgctatcatcataatcggcagcataccaaggggtagcctcatgcatccctttatctccctgaaacaacgccacattccaggcatgacttttcttcctctcctcttttttcatcgactccatcaaatcgtctgactcatagatacgcttttcattcaaataaaatggaaaaggcttcaaccctccctcactgatccacgcttctaccggtgaacctccgacactggaatttatgattcctaccggaacctttgtcttttgatagacatctttagcgaagaaataggctaaagcagagaaaggcatcacattttcaggagtcatcgcttgccaggaaattcccggaatatctgcctgcggagcatgaaaattatagagcagaggtgtttttatatagcgtaccatcggatagttactgtccgtagatatttcatcgcgaaaacgatctgtaacccgtgaaacaggcaattccatattcgactgtcccgaacatacccaaacatcaccaataagaatatcctttaattcgatatcattaatggccatcgtataaggtccgccagctttcaatataggcaaagtcactttccagttaccttgtacatcagcaacagtcttatatttctttttcaggaaagttatatcaacggtttcatcaggatcagccgttccccagatattgacaggttccccacgctgaagtaccattccgtcggaaacaagagtcggaagtttaacctttgctccgcccaacaaggcgaagcaaaggaacacaactactaaccctaccttataaaaccaatacttattcattctgtcttttcttttatatgtctttatttcatgataatttagcaagagaagaaatccatcgggattccactttgcaaacttaggaagtttcttcccacttacccagaaattctgattcaaatcattactcgcttgttacatcatcgtttacgtatgttacaaaaacttgttgcaatgttacattcaagctgaaaccaccgataaacaagaggaaagggaaagttttagaacgagcggattacagtagttattgttattcatttgatccactccaagataataacaactactgtaaccctcactctccccttctttaatcgttataaaatcatttattccaaatctccggtaaagtctccgctgacatctttaccagccaaaccatcggccactcccttataagcatgtttacgtgcataattagcatcccaaaggttcggagcgtcattcggtatccaattcacatgttctttttcattgtccgatactccccagatggtaataccatattgtttgtccgctgggatatacttcttgtacatatcaatgacatactgatacatttctgcctgttgtgccagattttcagtagtaggcgacgaggtgttaaccttaatatccaactcggatactttaatcaacttgccggtagcacccagtttctggaacatttgagcaatattgtctttattggaatcaatagcaatatgcatttgtgtaccaataccatccactgtggcccctttgctttcgatgtattccacatatttaatcagaccgtcacacttattgaggttatattccagattataatcattgatgaatagtttattatccggatttccatactgacgggcaagtttgaaagcttctactgcatagtctttcggagtcaggaaataatcttgccagtagaattcatcagaagccagatcagttttgcctttaccagtcttaatgtctgatgtttttccgtcatccattggttcattgactacgtcccatgcatgaacataaggtttgcaatgggtaaccatctttgaaatccagtcttccatagcatctctgataatctcggctttttcttcgtcggtcttctcaatgatagtaggaccggaagcgcgagtgactgcacgtgtctccaccactttctccgacaatacgatattatctatataataatcgcctgcactaactccgaaattgatacagaatcgattcatatcctctttagacactgtaaattctttcttaaattctgtccaagtcgtactcacatttccatctacatagcattcacctgcataactcgttgagttctgaatttgaatttggaaagtagttgagacacttgctttaatcatagcagagaactcataggtcttgccgacttccaaaggagtatcaaagccatatccagcctgtgccttatatgcattgcccgcccctccgtcaacagaactagtcagcttcatcgagtatgaacttccatatccttcaccttcttccgaaatcgtggcctttccactactccaagctccccaaggagtaatagctttgctttcaaaatctccgttagaaatcagattaaccacagtaggctccgcatctttgtctgtcacaacaatattatctacataataagtcacatccggcaaataaccaaattcaaatgcaatctgaaatgtagtactaacaaaatcattcactgtgatcttcacctgctgccattgagacgttgtctcaaaagcttccgtccaactgccacctgtagcataccagtctttatatggataattatttcctaacccatcaaaagtcaaccgggctttaccgggattatccgaacggacaaaaaatgaaatttcataattatgcccacttactgctgaaatgtcaggagtatataattgcactgaatgagcagccgttacagaagatcctactgcaaatttcaatgctttggaagtagctgtcagtccttccccttccacaatggacatcgcatcacttccatttttacgattccagccatcaaaggttccatcttcaatgcccgacaaatccaacaaattactgcccgccggccccggaataacttccggtgcaatcagactattcagataactcgcattctgattagtgtgccaaatcagacagtgcccataaatgctgatacccgcttctatggtctttgtaaacaactgatcgaccttatcaaatttcaaattccctttagaatcgaccataggaccgtgcttcatggcatatcctatcgtcagatcattaaagttctcattcacaatggtagtcgttgtctcgtcaccaagatattcatccatccccactccgatacccaacttaaagttgggatcggataaatattctttcaacggcttgtaacgagaaatcttttcagccaactgtaaaggcagttcggaagaagtaaccgctccatgtgtagggtctttataccactccatcttattatcgtcacacgatgtcaatatcagcaccgacaaggcaacaaacggaagcatatttctgtatttcataatcttttcaatttaaagtcattattattctgcatcctcttcttcgtccgggaaatcggtatattccggcttcgtcaaaggtacgacacgccagttatcaatataaatcttcacggaagttgctttggatagaaactctgtttctttatccgagctcgcacctgtgatcttatccaatgtaatatcagagttctcaaaatagaaaccgaagttggcataagaagcagatgcacgggtagcggccacatcggcaaaagtggtccaagctccgctggatgctttcgatttgtagaattcactaaacggaacagttacagtctgccaaccggttgtctggaaaggaacaatctttccgtctacaagccacggtacgtaattataacagtctctctcccattctccaccgttgaatccgttctgaccacaaatcttcaggaatccggattcagaccaaggttcgggcacataaatttcaaactgaatagcacattcggcaacaggagtttcagcagggacacccagcgtcaaccagtcaggatcagtgccattaccagctgtccaaacttcagcacaacgattcttcgctgctgccaccggcaactgtctttctaatggcaaacgacagtaagcaccttgcgacacattaccttcaccaatcgaagctgattccagttcggttgtttgaatcatactttcagaatcgccccatgccccttgtgcacccactccgtcgaagttcaacaacaagcctttcttataattgaaataggcaggagaataagcaccaccattcgaaccttctacgaaaatagaaccgccctcttcagaaactccggcaggcatatccaccataaaatattcaccgtcaagatcagaaataataccttctgtcaccaccacatttccggggaaaacgacttttgctatttccgtcaatccacttccataaacaatgataggttcacctacattcggcatacagttggagattttcgttatagacggtgcagcagcacgaatctggaaatcataaacgtattcaccgccatcttttaccaaacgaattgtattacgtacattctcgtcagcttctgtagtcggaactttactgttcacactaaccagaaaagatttattcgaaacaaaaaccggattaaaataacagttatatccattaatatacactttcttcaatccgttgaatccttcaccttcaattcggatcagttgtcccaaacgggcaaaatcaaccaaacggtcaggaacattcgacttcgcgtcttccagatagatccctgttatgttcatcacagaacttccgccattatcgtcatcgtcgtcacacgaaacaaatgaacaagagcagatgagcagactcaccaataagccaaatgctttcatactatttttatatatcaagcttttcattcgtattctcgtttttagttaaacaaatcggttattctgtcttccttaaatgcataaggcataggatccgctttcaacaaaggattttgcacagtctccgattccggataaggaagaaggaatatactggaatcgacgtcacctatggcacgcttcgtttcatccgaatcctcgtctctcttcaaagtctgtgtatccgcatcccatactacaggaatagcagtacccctatcctgtccggtgatataattgagtacttcctgttgtttataataagctctacgtaccaagtcataccaatactgtccttccagacaaagttccagtctacgctcacgacgaatatcttcgtaagtaatcgaattttggggttccaaaccggcacgcttgcgcactttgttaaagtattccattgcatcggcatcatctgttgaaggattatttcccaatatagcttctgcataaatcagatatacttctgccagacgcaacatgtaagtattgataggagtacttccggaagtgatcttcgcattatctttgctagaaccacaaacatatttcttacaataaattccggaaacagtacccgatgctttcttctcacaagtatatcctccgtttgctttctgtatttcaggataatgatcgccataagccatccaagtcggctgacgccgtttatctcctttttcatactcccaaatcacgtccggttgtgcaaaaacataaccgccccatgcacggtcattaccggtaatagccgactcacaagcaaaataatcctgtatcgtattacattccccatacgtaccattactaacccattgtaaagcaaacagtgtttccgagttgttatttttatcaatcataaacaaatcggcataatcagtcatcagttcaaaatttctgttttctatcacttttaaagccgctttctttgccaaatccagatagtcctgattacgggtcgcactattagggttactactataaccggcatacgtcagataaacacgcgacaacatgccaaaggcactgtatttattgacacgtccggcagcagaagaaacctccggcaaatattttgccgcaaattccaagtcacgcatcgcaaattcatagacatcacttaccgggctagtattgacaattggattagccaccagttcatccgtatcctcatttataataacatttccccataacatcgccagataggaataagcaactccacgcatgaaccgtgcttcagcaatatatgggttcttcacttcttcgctattggatgagttacctttgatcccgttaataatcttattagtttgctgtactatattgtataatgagccccaagccgaaactaacggccccgtcaatccggtttcggtcaaatcggcaaaaggatagatataattagaggttgtcgcacaaaggttgaatccgcgtccatcacccagtccataatagaacttatcgttaaagtcgaaccacaccttattatacaaaggagctgttgctgcccggaaatcatcttccgtttgataaaagttatctcctgcgatattggagttatcttcagaatcgaggaagtcactgcatcctgcaaacgccaaagctacagccaacatgaaagagtatatatatttacttgttttcatatttagtcactttaaatgattaaaaggttaaattcagaccgaatgtataaattcgcggagaaggataacgatagttatcaaagcctgtaagcaaagcgtcctgattggcagaacctatttccgggtccatccctttgtattttgtgaatgtatatacattctgcaggttacaataaagtttcagattctgaataccaatcggtgccaaccatttacgcgggaacgtatagccgaaagagatagactgaatacgcaggaaagaaccatcttccacaaagcggtcactgaaacgataattggaatcatctgtccctttggcaatagccatacggcaagcataagggtcaccgcctacaatctgtatattccgataatcatccggaccattcggatcaatcaaagccagttgtgcataatccaacgccgatttcaggatattattattgccccgtggattttcaagttcacgacgcccccagtttacaacttcatttcccaccgatccggtcaggttaatgctcaagtcgaagcctttataagagaaagagttaccgaagccgaaagtaaagtccggttcaggattaccgatataagtacggtcctgttcattgataacaccgtctttgtttacatcttcaaaaatataatcaccaatccagatactattcttggaaatcgacataccttcaggcaatgctaccggcttaattgctccggaagcatctttatagtaaaagtcagtagccttttcaaagcggccaatcactttataaccataaaactgtccgatagggtttcctactgatgtacgtgtcagtacggttattgtttcgcctgtctgattactcttatctatcaggctggttgccgtatccagcgattttactttattacggttcatagagaataccacgttacttctccattgaaatccgcctttatcaatattcactgtatttaaagtcaactcaagtcctttattctccaaagaacccacattcttccagggtgcggaagtagagccctgacctgaagttcccacgtaagcaggaagaggcacttgcaacaacaaatcatttgttttcttataataaatatcggctatcaattcaatcctgttctggaaaagattaatatcaagtcccagattacttgaataagtagactcccatttcaattcgggattcggagtattgccagccagcaatcctgttccccaaacggtagcaacagatgaataaatggctttatatgcattattaggcacattctgattacctacaacaccccatcctaaacgcaatttcagattattaataatattgttgtctttcaaaaaagattcattggaaaccttccaagccaaagcagccgacgggaaccatccccaacgattatctttgtagaatttggaagaaccgtcgcgacgaagagtaaatgtcaacagatatttgtcatcgtatgaatagaacagacggccgaaataagataaaatcgaactttctccactattaccattattcttggctgttgcggcatctcccaatgtcaggtcggttgcggcattggacaaatatcccatacggcttcccatcagatattcccatttgctctcctgcatttcctgaccaatcattgcattcacattgtgcactccaaaagttttcatgtaattcacgatatttctccaactccagaacttattatatgatttggagaaagtcccctgacggtccgtattttcaatcgcaccaaaagtatatgagggatcaaatttataagtattagttaccccataatcgaaagacaattccgttttaaacgtcagtccgtcaatgatagtagcttcagcataggtgtttgcccgaatacccattttctcattgcggttatccttaatcatggcaagacccaccggattcgtttgtacccattcgtccgtatccggtccgtcaaatgtgccttcagcattacgaacagccacactcggactctgcaataaagcagttctaatcaacgactcgtcagatacagtcaatttctgacgggaattactaaacgcaaagttaatacccatttttaaatagctcttcacctgggcatcaaaactacctcgtaagttcagacgcctgaaccctgaaccaacagcaataccatcctgattgaggtaacctgctcccaatgcatagttacttttatcagtacctccggtcacagaaagattatgactggtcatcatagctttagagaacatctcatcctgccagtctgtaccctcacctagtaaatccggacgaacaaagttattatccttgttcactattccccaatcatttcccgaatagtcttttcctgaacgaacattcttatgctccgcatattcacgcagattcagcatatccagttttttaggcatttcctgccatcctatatatccgtcataagttatttgcgcctcacccttctgtccacgtttggtagtaatcataatcacaccgtttgcagctcgcgcaccataaatagcagtggcggaagcatcctttaatacgtccatagagacgatgtccgaaggattgatagatgccagtgcattatcacttcccgaacctgtggaaccgtcgatgataacaccgtcaatgacaaagataggttcattggaggcattcaaagagttgataccacgaatacggatggaagaactaccaccgggcataccgctattagcctgtacctgcacaccagcagcacgtccttgcagtacctggtcaacggaagtcactacagatttcttaatggcttcatcgttgaccgatacaacagaaccggtcaggtcactacgtttcatctgaccatatccaactacaactacttcgtctaatacttttgcatcttctttgagggtaatatcaaactgctttttcccggctacaggaatcgtttgtgtctgatatccgataaaagaaatcttcaagctacctttggctgatacattcaacttaaaattaccatccaaatcggtaactataccattggtagtgccagcttctactacactggctccgataatcggttcgcccgatgcatctttgaccactcccgtcacggaaacagtctgtgccaatacccatacagggaagaggcagaaaagaatgataagacctaacggtcgaaaataatgatttgtgctttccataaaatcatttttttaattaatccttaattccgcaacactattacaaatataactttttaagtacctgagcaacaaaaagttgctcaggaatttgccatgtcagatttttcacctatcttagtgttgcaaatcaaaatatgtatcaaacccgacagacatggcaaaggtagcaattaaatccgagaaactcactccttttggaggaatattttcaataatggagcaatttgactccagactctcatctgtaatcgactcaaccctcggtatgagatgcaggctgtatggttatcaatacagcgaaatcatccgttcgcttatgagcgtttatttttgtggcggctcatgcatcgaggatgtcaccactcatctgatgtaccacctttcgcttcatccgacacttcgcacatgcagtgccgacacgattcttagagccataaaggaactgacccaggataacatttcctacacatccgacactggcaagacctacgacttcaacacggcagacaagctgaatacactgctcctcaattgcctattgtccacagggcagctgaaagagggcgaggggtatgacgttgacttcgaccaccagttcatagaggctgagaagtttgatgcgaagcctacatacaagaagttccttggttatcgccctggcgtggcggttattggcaacttgattgtcggcattgagaacagcgacggcaacacaaatgtccgtttccaccagaaggacacgctgaagaggttctttgaaaggtttgaacaaaacaagcttattatcaaccgtttcagagctgattgcggctcgtgttctgaagagatagtggaagagattgctaaacactgcaagaccttctatatccgtgctaaccgatgcagttcgctctacaatgacatctttgccctcagaggttggaagaaagtggaattgggcggcattgagtttgagctggcctccattctcatcgagaaatggaaagggaaggcataccgtcttgtgattcaaagacagaagcggatagacggcgaactcgacctgtgggaaggagaatacacctaccgctgcatccttacaaatgactacgagtcttccgagaaagagattgtcgaattctataacctccgtggagggaaggaacgcatcttcgatgatatgaataacggattcggctggaacaggcttccaaaatcctttatgggagaaaacacggtgtttcttctgcttatggcactcatacgcaacttctataaattcatcatggcgaggcttgacgtgaagaggttcggactcaaagcaacaagccgcatcaagacgtttgtctttaagttcatctctgtgccagccaaatgggtcaggacatcaaggaagtatgtgctgaatatctattcatgcaacaatgcttatgccaatgtgttccagaatgactttggataacaccgacaacttatagtcgtgattttgcgtattgcctcaagtcgcatggtggggtaaggggcatttatatgtctttatggtgacattcgatgcactgtgccccctttttactaacgatgcagattcttttcgcttctgtatcatattaggcgcgtagttgcggatttgaggttaataatgatagtggttaatccaagttataggtttttctcttcttatttataataaggaatagagtaaggaattcatgtttccataagcagttattattttaaggtgtccgacaattcatttttttggttaatgcaaatttatggataatatatcaagcataggtggagattttgtttcaagcaattgacaggcggttacatacacttgcatgtacgttacaagctattgcacacccgttacatacccctcccagaagcatccctaaagggtttgcacgtaacatcagtaaaaggaaaagtaacaaagctaatgctattttaatttaatatagtatctttgtctatataaaaagcaccaataaaccctgcttatattaatgagtatgaaagcacaaatcctattccttttttccatatactgtttcctgataggaagcactcctgttatgaaagcacagaccggcaaattctattcaacagacaaagaactttccaacagtctgatcaatgccgtatatcaggaccggaaaggatttatctggatagctaccgaaaacggacttaataaattcgacgggacacgtttctcgatctatcgacataatgctacggatagcaccagtttgaaaaacaactatgtacggacattattcgaagacagtcgcggtaatttctggatcggatgcatcaatggcttacagcgatatgaccgcgccacagacaactttcacgaattattcatctctcggaaagacggacgaaagaatcctcatatcacttccattattgaacgccggaacggagatctttggatagcaacttccggacaaggcgccatatccctaaaaaagaacagcaatcccgcctccttccatatcgaaaccgaactgacagaccggataggtagtaactacctgaatgtcattttcgaagattcccggcaaaatttatggattgctacagaagaaaaaggactttaccgttattctccggaaagtaaagagcttaaaagctataaagcaccttatcatatagcaggtgatgacgtttctgccatttgtgaggatgcacacggacaaattttcgtaggaaccttgacaaaaggtcttttcagactatcatcccgacaggaaggaaacttcgaacctgtcctctaccaaaaccggatgaatttgaatatccggactctcatcattgatacccgtggaaaacttatcataggaacagacggtgaaggagtaaaagaatatcagcctcaacaagatattattgtggacagtgagattaatgcgggtccctttgacttctccaaatccaaggttcactcgttaatcgaagataaagatcacaatttatggctgggcatttttcagaaaggtttgatactagtgcccggcatttcaaataagttcgactactacggctacaaatcaatacacaacaacaccattggttccagctgtgttatggctattcatacagatgaacaagctacaatctggataggtacggataacgacggattatatgccataaacgatcagggaaaacaattacgccattacacccatcaggcaggtaatccccaatctgtccccggcactatcctatgtctctatgaagattccaatcaggaactttggctaggatcttacttcgatggtctggcacggatgaacaaacaaaccggaacatgtcaagatgccacctcgcttttacaaggaaatcttaacgcaggcaagcccaaagtttcctgcatcattgaagacaaaaacaagaatctctgggtgggtacttatggttcgggcttatacaaaatcaatttaccaactcaacatgtcacctattacgaatctacccgcaacgaaaacgatgactggagcatcaaccgtcttccgaacgattggatcagctacctactggaagataaagagggaatgatatggatcggcacttataaaggtctggccgtactcaatcctcaaacggacaattttatcaattataaaaagcaaaacaatctcctccccgggtatgtcgtttacagtttattggaaagtagtaatggagagatctgggctggtacttccgaaggattggtctgcctgaataaagacagactaacacctgtacttttcactactgccgatggactccccagtgatattatttgcggcctggctgaagacgagaaaaaaaatatatggatcagtacccatcagggaatctccaaactgaatcctccagaaaagaagtttatcaactattatgcaggcgacggtctgcaaggaaatgagtttacacgcactgctgtatttaaagataaacgcggcaagatattttttggaggtaccaatggagtaacagctttctacccccaggatatcaccgaaatcaaaaaagaaatgaatgtattgattaccggctttcacgttgctaaccgccctgtgaaaaaaggggataaatccggcaacaatgtcatcactgatactgctgtcatggataccgagcaatttacactggcatataatgaaaatacattcagcattgatttttctgttttggaattcagcaatcccgaccggattagttatcaatataagataaaagaattaggcgatgaatggatcagtacgcaaccgggaacaaaccgggtgacttatagcagtctgaaaccggggaaatacactttctccgtacaggcacgcgaccataataatttctctaatatccgcacagttactattgccatcactccaccctggtaccagacctggtgggcaaaagtaatctggggatgcctcggagcattactaatctatgctcttaccatgtatattctgtcacgtatccgccaccggcaagaagtgatgcgacaaaaacacatggaacagattaacgaagccaaattacaattcttcattaatatctcacatgaaatacgtaccccgatgactcttatcatcagcccgttagagaaactgttagccgaacattccgagaaacaaccggtttatctcatgatttaccggaatgcccaacgtattctacgtctgatcaatcaactgatggacatacgaaaactggacaaaggacaaatgcatctgaaattccgggaaacagacatcgtaggatttatcaatgacttgatgcaaacattcaattatcaagcgcaaaaaaagaacatcacatttactttcgaaaaagaactggaaggtgctgattctctgaaagtatggattgatctaaataactttgacaaagtattgatgaatgtcctttccaatgctttcaaatatacacatgagggaggaaatatcgaagtgttattgaaaaccggtcacaacgatgcctaccggggtgctttgaaagattatttcgagatagatatcaccgataacggaatcggtattgacaaaaacaaaatagaacaaatattcgagcgtttctatcagattgacaacgacatgacacaatctaatttcggtacaggaatcggactgcatctttcacggtcgttagtggaactgcaccacggcatcatcaaagcagaaaaccgcgaagacggacaaggaacccgtttcatcatccgcctgccgttaggtagtaatcacttgaaagcagaagaactggaaaatcctgaagaaaccggaagcgaaccaacaatctcccaacttcccaaagattcgatctatgaaacggaagaagaaaacaaaactaacgagtacaggaaacacaaagcaaaaacacgttatcgcgtcttaatcgtagaagatgatgaagaaatacgccgctacatacgtagcgaactggatagtgatttccgtatctatgaatgtacaaatggacgggaaggactggaaaccattttgaaggagaaacccgatctcgtcatcagtgatgttatgatgcccgaaatggatgggatcactctctgccggaaaataaaacagaatatcaatatcaatcatataccgattatattattaaccgccaaatcgaaagccgaagaccaaatcgaagggcttgaaattggagcagatgcttatatcgtaaaaccattcaacactgaattattacgaactactatcagtaatctgatagccaatcgggaaagactgcgtggcaaactggtaggtgaacaacaagtagaagaaaaaataacaaagatagaaatgaagtccaatgatgagatcttgatgagtaaagtaatgaaaaccatcaatgaccatcttgccgaccctacccttaatgtagagatgctggcagccaacgttggaatgagccgcgtacatatgcaccgcaaattaaaggagttgactaatcagtcagcacgagatttcattcgttctatcagactgaaacaagctgccaatctgctacgtgagaagaatctaagcgtttcggaagttgcatacgctacaggcttctccaacctctctcatttttccaatacattcagagacttttacggaatttcaccgagtgaatataaagaacaacagatgtaacaaacagaattagacttgttacaaacaagaatctaaattagaaagaaagccgttattgatatgacaaataatgactaaagctacttatacataatcaatgcagactgtccgggaataattacttccggtccgatctgcgtacctaatccacgcacatctatcacaccatctttgcataccactgtatatttaccaacaggcacttccaaacgcgcaggagtcatacgagaattaaacgccacgataatatcttcccaactatctccgttcgcatgatccttcaggcggaatgcaatcaggttttgtccttccaccggaagaaactccagatgcttccgaaccttttccgcatctcccatacggaaagcgggatgggacttacgcagatctatgagtcgcttataatacatgaaaacatctccgttcgtcgttttacgtcgccaatcgatagcattgactgcatccggactcttataactattgtccactccttgtttatcgcgcatcacttcttctcctgcatagataaaaggaataccttgcgaagtgaagactaccgtctgcgcaagcttatcaagtcgaaccagttgctcgggagtagcgcccggcatacttgctttcaagcgatcaacaaggcacaaaccgtcatggcaggaaacgtagctaatcatctgggtaggctgctccgcccacggtttctgactataattaacagaatcacaccgtacttgcggatgctcaatagcacccacaataccgaatttaacactcatttctgctcccggaactccggcgaggaaagcccctttctcctttttccacacaggtccgcaaagcccatcacgcaattcatccgagaatacggcaattcccggcatgtgggaaacattccctttcattgccaacgaatctgccggatattggggattgtctgctgcccaaccttctccataaatacaaatggtaggatcaaccttgttcaccgctttccggatctcattcatggtttcaatatcatgcactcccatcaagtcaaaacggaaaccatcaatatgatattcttttatccaataaagaacagactctatcataaacttgcgcatcatagggcgttcacttgccgtctcattaccgcatccggaaccatttgccaatgtcccgtcttctttctgacgataaaaataaccgggaacagtacgctcaaaattactttcaacggtattaaaagtatgattataaaccatatccattatcacacggataccagctctatgcagtgcttgtaccatttgtttgaactctttcacacgagtggcaggttgataaggatcagttgaataagagccatccggcacattataattcgccggatcatatccccagttatagtggttttcttccagttttgtttcgtcgatagaagcataatcagaagaaggaagaagatgtacatgtgtcactcccagttctatcaagtgatcgataccggtcaataacttatctgaattcatggtcccgtgttcagtcaatgcgaggtatttacctttattcttaattcccgaagtagaatcaaccgagaagtcacgatgatgcatttcatagataatcatatcagcaggagatttcagagaaggacgtctgtcactctcccatccctcgggatttgtagtcttccagtcaataatggcagcacgtttcccattcactccgacagcatgggcattgattcccggcgtgtctccctgccatttatcattgatttttacattgaaggcatagaatttgccaagcaggttctcatctactgaagttgtccaggttccatcttctgtgggctccatctttactgtttcataagcatgtccgccttcaccggcatcatatagcatcaggcgtacttcttctgcagttggtgaccaaagataaaatttggttgccaacggcgtatattccatttccgtaagacttcccgtacgaaccggatacagctcaaaagaagcatattcctttttcgcaggggagcagctcattactgttgtcactgtagtcacccctaatattgctaaataattacttcccatcttcatttaaacctcccctagatatttcctttatatctatccctataatcagtcgctttacttcaccttatctggattcttcgctataaaatccttccagctattataacctttttccatggtcggccgccccatttgcaggaaatgacaataggctgccgccaatccgtctgttgcatccataaaagtaggcatatcctcttttggaaagcgcaacatccgctgcaacatatccgctacctgttcttttgatgcctgcccgtttccggtgatagccatctttatcttcaaaggagcatattccgtaatcggaatgtcccggctcaacgccactgccatcgctaccccctgtgcacggcccaacttcaacatcgattgtacatttttaccgaagaaaggcgcttcaatagccagctcatcaggcagataactttcaataatactcaatacccgttcatggatatggcgaagtttcagatagtggttggcaaatttacgcaagtcgataatccccatcgcaatcatttcaggcttggttcctttcactcttagaacaccgtatcccatgattgtcgtaccggggtcaatccccaggattatcttttcttttaccggttgaatcactctatcacctccatcagggtcggaaatccgatcactttatctttaaatatttttgccagttcgtcattcaaacgtactccctgttccaaatgccaacgatgcagtaacccgctgctttccacctcccattgcaaagaatacgcacttccttcttcccggtgacttaatatccggcaaatgcggggtgccttcaacgcaccgtgtttctgtacttcagggatataactttcttttatccaaatcatgaaattgtcgtgaacatcctcgtccacttgaaaagttgtattataaatcagcatatcttaatttcatactattatttaccgcaaacatagcaattatttcagaataatgcattatatttgcggcaacaaaaaaagattcgtttacaaacgttatcatataagacaaaaaaggggcgttagctcatctggctagagcgtaacactggcagtgttaaggtgatcggttcgagtccgatacgctccacaaacatcgcagaagggttctaaaacagaactcttttttctttttttataactattccatccctctattcccttcaaaagaaaaactcatagaaaaaaacgcctaaatctcccatgtttccggccttacagctgcatttccgactgaacatctacactttcaaaaagatatcgaatacctacaaataggtatttcaatgacgttttatcataaaaacataaacaagaagtattatatcttaagatttttatgttattttgcattgcataattctattataaaaatgaatcatttaacggataaagaattagtaagtctattcagtacggataaagagagggccttcaaccttttctttcagcgttactatatccgtttatgtatgtatgcagtacagattacggatgacttttccgaatccgaagatatcgttcaaagtttttttatttcattttgggaaaagaagctctataaaaccattactgacaatctgaaaggatatgcctatctctgtattcgcaatgcatcactgaaattcattgaaaaacgagaaaagatagactccagcgatattcttctcaacgaagaagaatacctatatatatgtgaaagccttgaagagaatgaacgtgaacaaaaagaaaaggagttggaaaaagctttagcagcattgcccgaacaagaaaagaaagcactctatggtgtcgttattgaaaacaaaagctataaagcagtagccagtgaactgcatatcagcgtcaatacattaaagacttatcttgccagagcgatgaagaaactgcgtaaaaacgagaaattacttctagtatctttattcttgataaacctttcataaatcttccaagaaaaaaagtctctcgtttttgacacccattttacacaattccggatcatataataaaacgagagaaaagatgaatcaagaagatcataataaaacggagaaaaatctgattactttgctcaactggtaccggttgaaacgggtaaatgaatttgcggcacaatgcgatgaagcacaagcatgggaatcaatccagcaacgcatccgccaccgtaaacggatacgaatgtacacctattggagcagcactgccgctgcctgcctgttaatagcagctttcagtttttacacactcacagaatatgaccaatctctatttgcacacagaggggaacagaaagcaaccctgtttgtaaataacggagaatcttacgacctgctgtcgcaagataaatccatattcaatgcaaacggcatgcaagttgctcaaaatacagaaaaagaattaagatacgacactcaaacgagtatacaaaagaatgcagaaaagcatattttaaatgtacccagaggaggagaatataaactcgtgctttcagacggtacacgcgtacacgccaatgccgaaagccgtcttacttatcccgtttcttttaccggtaataaaagagaagtctacctcacaggagaagctctctttgaagttgccaaagatacgctccatcctttcattgtacataccccgtacggtatagtagaagtagtaggaacacggtttaatgtcaatacttacgagaagaatcaaactaccgtaaccttggaagaaggagccgtaaaagtatactgcgaggaaaagaaagggacagaacaaaaatctctttcacccggtgaacaagctgtcatacaatcaaaaacaattaatacacaaacagttcaggtacaggaatatacttcctgggcaaacggtatatacgaatataccgatacgtcactggaaactattgtgcaacaactttcgcgctggtataacgtcaacataacctttaccgacccgcaattgcgtgaacgaaagtttgcaggagtcatcttccgcgaccaaccattacaaaaagcagtagatatattatccaaagtttctaatgtacacttcagacagaagggaaatgttattgagataacagagaaccgtccccaatattaaacaggaaaaagcgttgttcaaatatgaaaaaatatcttttaatccggatgatgcaaacagtagccattatcctgtttgccgccaatgtatcggcacaaaaccaaaatgtggtcatatcagtacggaatatcccggtacgtaccgcactgacccagattcggcaagctgccaatgtacattttgtctatgaagagaagaatattaatagccaacagactgtaacactcaattatccgcaagggacatcattgaacactttactcaacaacctttgcaagcaaataggactgacgtacgaaatcaatgaatccgttattctactctatcctgctcaaaagcaaaccaccactcatgacatccatatcctgttattggaaaggggaaacaaacagccgctaccaatggcaacctgcattctcaatccgctaggagcttatgccgcaaccgacatggagggaaaggcagtactaaaaaacgtccccacaggaaaatacatattaaatatttcgtatgtaggcttcgagactgtgcaacgggaaatcaacgttgaacaaaacctggatctgacgatccgcatgtctcccacttcgctagctttgaaagaggtagtagtggtagcaaaacaaaatgcggccggagaatctaccagctccattataggcagacaagcgatagaccatttacaggctatgagccttgatgacgtgatgcaactcataccgggacacttaatgaaaaatacagatttaacgtcccgttccaatgtgcagctccgtactcttgttaacaataacaccaatgccttcggttcgagtatcataatggacggagttcccatgtccaacaatggtacactatcgcaaggaggattttcaagtaccgcatttgtcggaacagacttacgccaaattagcgcggacgatattgaatccgtagaaataatccgtggtattccttctgccgaatacggtgatttaacctccggacttgtagttgttcattccaaaatcggacaaacaccctggcagatcaagggaaagataaatcccggaacaatgaattactcgctcggtaaaggattgcgtttaaacaaagatgccggtatcctgaatttcaatctcgactatgcacaagcatggggagatccacgccagaaaacaaagtcattcgaccgttacacctttagcttgggatacagcaaagatttttcacgtatctggcatacagacacaaaggtacgttacatgatgggtaaagactggaatggaaaagacccggatgccatcgacgacggcacttttcaaaagaatcgcaaccagctgttctcactaagccataatggcaaactatcaattaataaaccattctcacgtactgttaattacacattaggtgtcagctatactcaaacagagatggaaaagagcgccattgttgccaattcgtccgggttgctaccgatacttactgccacagaaacagggtattataatgtgcctttcgagcaaagctcctatcaggcaagcggaggttcccttagccgtcccggaaatgtatatgccaaagtcagcaacacgttcttcgtaaaatcaaagaaaacatatcagaacttcaaaatgggagtggaataccactacgactggaataatgcccgcggatattataatgatgacgaccgttacccattgcaacccaacagtaacggacgtccccgtcctttctccgatattccgagcatccatcagatggccgcttacatagaagataacttccgttgggatatatcagaaaacagatttctgaaaatacagttaggcggacgtttcaccactttacagccgtgggcggatgaagcaaccttttctttctctccccgtgtaaatgcttcgttctccgtcaacaaatggctaaatatccgtggaggattcggactcaactcaaaaactcccggtttggattatctctatcccgacaaaaagtacatcgaccgtgtagctgccaattatatgcctcaagacgacaaagtcggacaaatattaatgtaccacacccaagtgtacaacgtgcaacgaactaaaggattgaagaatgcgaccaatcgcaaatgggaggcagggttcgacataaagttatcggacaagcataaattaagcctcatcggttatcatgataaaaccgctaacggattcggatcggccacagaatattttacgtatacagccaactattattctgcggaaaaaggactgattatcactcctggacaagccacaaaaatagattgggataatccagaacgcacggaccttgtactcagtacgaccggtaaaataggaaacacgaatgtctctatcaataaagggatagaaatggactttgacttcggcgagattccggcactgcacacttcattctatctgtcaggagcatatatggaatccaagacttactctacagacatcaacagtagcaatcctaccgatctacctactgaatatcaggtaaccaataccattccattcaaaattgtatatccatccgggctaaactatagcacttaccgccgctttacgaacactctgcggattgtgaccaatatcccggcactgcgtatggtagcttcgttctcaacacaagccatctggtacaattattccaagagcaacaatcctccgatggaccccatcggatggatagacacagacctctcttatcatgaaataacagcagatatgctggcagatgagaactacaaaataaaaggggtatcattgaaaagccaacgcaagaatcctaaagacaatgtgccaagcaaagcccctattacatggttaatggcgggacgcctcaccaaggagctgggcaatataggcggcatttcattctatgccaacaacatactcttttacgaaccttttctcaaaaactctacctccaacacgctagtacagcgtaatacaggtaatttcagttttggtgtcgaattattctttaatttataaatcacaatatgaatagaacaatttcttttattacaaaaatgatgtttgcggctgtcacagttatcatggctgcatgttcctctgacgacaatgccacacaagcattgaccgtacaagtgaaagtatccatgcccgaaggattcaagtccgacattctatatacagggcacactgttacaatgggtaaatacactgccattacaaacgaaaaaggtatagccactttcgaaggagtgattcccgatttgtatgacatctctacttcctgcgaaatcactgcagaagaatatgaagaaatgacaggcaacgatccgcaaaatgaaaattatgtgatttccggcagtctattgaaatatactgtcggctcgtcaacaaccatcgaacttcaaacaagtatttctgccaaacaatcaattgttatcagcaaagtttactatgcaggaaccaaagacaacaataataaaaattatctggcaggaaagtacattgagttctttaataactcggaccaaaccgttgatatagccggactttatttcggactggtagagtcggaaagtactcctgcatatacgcttggctccacaccggaatatatttacctaaagcagatttaccgtttcccatctaatggagtcacagaagttgcaccgggagcctcgataatcgttgccaatagtgccatcgaccatacaggaaataatgaagtagatttatccaaagccgactttgaagctaaagatacgcaagggaaaacaaccaacaatcctgcaaccccggctgtagaactgatatatacaacatttcccacaatcagtaatatgaatctggtacaaggtggtccctgttctgttgtattattcagtacggatgaagatgtaacctcatgggaaactgtatacgttgacggtaaagataaaggaagcaagtttgtcaaaacccctgtaaaatacataatggatggtgtagaatgtttgaaaaacaaaagtacgggagtagataaaaattccaaacgtctttacaactacattgatgcaggctatcaatacacggaggctaccaccggatataccggagaagtagtctaccgcaaaacagccaagacagaaaacgggcgcaccattcttgctgataccaataacagcagtaatgactttgccgtatcagctgaaatcaaaccgagggaatacaaataatagaaaataaaagagactgtgccccaagaacatataaccttccggtacagtctctcttcaactacttcacgaaataattaaaccaattcagaaatgatgatgaaccatcgatatatactctttaccggtctgatggtaactgcactgtgcatacatgcccaagatatcgaattacagacaaaagaaaaatacgagtacgccgatgctacccagttatggagacgtaccctgaatcctgccgggctctctttggatacgctgaccaaccggggaatcagttatttcgaattctctcatcagcaaggcacacactatcgggttcaggacggtgatgagcaaaacaaattattgttcacttcggaacgataccaaaaaattgggaaatatctctacggatacgggcgttttacctttgacatgggacggcaattcaaccgttcatggagcgacgtattgcgtagccaccactccaatccttacttttcaggaagctccatcaaaggaaagtacgacttccagaacttcgacctctcggcagcgttagccactctgcctatcaaaaacttcactttcggcgcacgactggattataaagtaggagatctttcccgactgaaagacccccgttcacgcaccaatctggcagactatcaactgactcctgccgtcacctacacgtggaacaaacactcgctgggtcttagcggttattaccatcgcagaaaagaaaaaatccctaacatcaccaccgtacaaaccgatccgaacctcaaatactacaccttcaccggaatggaaaatactgatggtaccactggtggttactccggttttgaacgtgaattcgtcaaccatgaatttggcggtgaattgtcttatcaatataaaaacgaacggattcaaacacttaccaccctttcatacgccaaaggcaacgaagacgtatggggagacatcaaatattcaccgggaaaatatcacaccaccacctacaacctgctttctatgaaccggatcaaatccggacgcacagaacacatcatcgacatttccattaactatcagaccggaaaagccgacgaataccgtcaggaaaaaataatagaaaaagatccggtaacaggtatcgaatcttcctactggaacacacttctcacgtacgacgaacgttacaccgtcgatttactcaatgccaatctgcactaccgcctgttgtggagtaatcatcacactggagaagccacagcctacgcaggcgcacgcgcctatttccaatcggtagaagatcaatacaatcttccgtcttcatcgcttacagtccgacaggcaactatctgcatggagggcggatattcattcctgcgcaaaaacaaccgttcattatggatagaagcagaagccggatatcacatttcgctatcatcggacctgtcactcaacgatccgtccactgaatacgcccaaagtgtgcttttacccgacatgacctattatggagcatcgtatgcgcacggaaaactgcaaatacaatatcaaatgcctgtaactataaagaaacacaccaacgtgtggttcgtcaaagccacaggagcatatctgaagaccgacaagaaaaccgattccaaaatgttcggaataagtctcggattgtaccattaaccttcctcacctcacaaaaaccaaccagaaaatttacaccaatcatgatgagaattgccaataacaaacttcggttgctactcctgctgctctttcccaccctcctttggggtaactctgcccccatgtttcacatccggcaaaacaccaaaggatgttttgtagaaatacccaaacggttgataaaccgggattttctgttagcagcccgtgtgatgaccgtcagttctcccaataataaagttaaactttatgcaggccagcgactttatgatccggtatggatacgtttgaaatatgacaaagaacagttatatttattacgtcccgactccaagaacttatgcgaggatacaactcatctctcgtatccagcctatgcgcgcaatgctatcactcccatagcggaatcctggaaaatagaacaggagacagacagctcgattgttgtaaactggagcaaatttcttagtgagcccatagaaggtgtagacccttttggagggaaaacgtcaccaggacgttccctgccccaactcaataaaatacttcaggtagacgtccacgaaaagaacctggaagtcagcgtacagtatggttttgaaggaaccacccaacctttcctcactacgatacggaaatcgctgttactactgccagagcaacccatgcaaccacgtatacacgatgcccgggtaggatatgacaatatccctaaacggaaattcaacttcgatactccctcaatcgcagcggaaaactacatcacccgcttccggattgtcccctctcctaaagatgtacgcagttatttgcaaggcaaacaagtgaagcctcaacaacccatcgttttttatatagacgatgccttccctcctctttggaaaaaagccatacgcaaaggaatactggattggaacaaagcattcgaagagattggctttaaagaagttatgcaagcaaagacatacgccgaagccggaccggagttcgatccgaacgatatacgtttcaactgtttccgatatgtagtcagcgatttcccgaacgcaatgggaaaacactgggtagacccgcgttcaggagaaattctgcaagcagacgtattgtttcacagtaatgtcatagccctgctacgcaaatggtatttcctgcaaacatcagcctaccatcctgcggcacgcacgaaaacactaccggatgacataacggcacaattaatccgttacgccgccgcccatgagataggtcactgcctcggactggaacataatttcaaagcctcgtatgcctataatacagaagacctgcgtcgtccggaatttacagaacgttacggcaccaccccgtccatcatggattatgcccggttcaattatgtcgcccaaccgggagacggcgtccgttacgtattacctcccctgttgggagtatacgaccgatacgccatccgtatcggatacgcctatctctcccgcgagaacacccgaactgtagccggatggatagatgaaaaacaaaacgaccccatgtatcattgcggacgcatggcaccgagcaccatccccactgatcctaccgttcaaacctccgatctcggtaatgaccccgtcgcatcggcaacctacggaatccgcaaccttcaacaaatattgacgcaattgccggaatggaacaaaaaacgtctgacagataacccgtttgaggagatgcccgccacctataccgatttgcagcaagcctatttcgaccatctggaacgtgtgattccttttattggtttctccgatgaagtatccggaaaagctgtcgaatttctttggaaagaactgcttggcggatacaacttcctacggacggatgccgtatgcaaatatgccggcaacccaaccgaagccatcataaaagcacaaaagacaattattgaaaagatgtttggcagaatcattgccgaacgaatctcttcgaacgaaacaccagcaggatttacctacgcccattatctggaagtctctgccaactatctttttacggacaagacaccggacatattcacacgacatttgcaggaaagctatctccagaccttgcaatcattgctaacagaagcacgtacctcctctttcagtgtactcttctcccctacggtcagcgagcatcttacccgcatccgcgaacagttaacaactaatccttctacctggaataattatttaaaaaacaaaatacaatgaagctaactaccattatttccgccttctacctcttctgcctgttgtgcatacagcccgtgcatgccgatggaggcttctggctgcctactcaaatacaaggaaaagtacaccaggcaatgaaaaaacagggattgcgccttagtgaaaaagatatttacgacatcaaccagtcgtgtctgtcgaatgctatcctttcattaagttatgacaacagtacattttctccctctgccagtgcctctttcatctccggtgaaggactggtattgaccaacttccactgtgtcgcacgttatctcgaacatatctccgatgcaaaccacgattacgtgaagcatggctgctgggctacccaacgcagcgaagagacttatcttccgaacttacaggtcaatcaattaatcactatcaaagacgtaacgacagaaatcacacaagataccggaaatcttaccgatcaggcacttacccaaaagatcaacgagaacgggaataaaattgtcaaatcccaagccaaaggtcgtggtgtagaaggaaaaatctactccttatttggtggcagacaatacatcctggctgtcttccgctgcttcaaggatgtgcgtatcgtagccgctccccccatctcgatagggaaattcggaggcgacacagacaactggcaatggccccgttactccgccgatttcgctatcttgcgcgtttatgccaacgataaaaaccaaccggcagcctacaacaagcagaaccgcccctatcaacccgacgctcatttgtctatctctaccaaaggagtgaaacccgatgattttgtgatggttgccggatatcctgcacaaacaagacaatatgtcccttcgttcgcccttgagaaaattgtattcaaagacacgcaagcagaagcagatattgccaaaatcaagctcgacttctacacacaacgtaaagaaacggctgccgactcgctttattcctactataacattaaggccggaagtgctgctaatgtctatctaaaatcaattggtgagatcagtggtgtgaaagaatccggcatcattgcccggaaacagcaggaggaacaggcgatgacaggatggattctgtctgatgacacccgtacgcaacgctacggggcaacattgctcgatgatatgaaagcaaactacgaacgtcttacccaactgaacttcacagaccagatgtttcgcgaagtcgcactttatggtgccaacgtcattccttttgccggaaaatttgaaaaactggtgcaaatggaacaaagaaaaagcaagaatgtaaagactgccatgaaaggagaaatccgcaaactgaaaccgcttaccgtagcattctatcgtgatttcagacctgaagacgacaaatatatcatgaaaaagatgttggcttattatctggaacacgtagattctattttctactccacagcattgaaaaaggtagaaaagcattaccctcaacatctttctgcctatatagacagcctgtacgatcattcccccctgcgtaatcaagaaagtatgctcgcacttctagacagtgtaccgacacaaggaacagctgcactgtcacaagatgggctgtatcagttgtcactcggtttctatctggtgtatgtagaaaaaataaaccgtttgaaacaagcgtatcagaataaaaacatgaaactctactctttgtatctgcaagcatacgctgaaaagaacaaggggacacaaattgcatttgacgccaaccgcaccctgcgttattctacgggaaaagtaaaggcagccgttcccagcgaaggagtcatctatactccatttacaactgttgacggaatgctcagccgtcatcgcctttatgccggaaacaaggacttcaatctgccggcacgtttcgtcaaactcatcgaacaccgccaacccagtaactactttagccagaaagtgacacccacctgttgtttcctgacagatgcacataccacttctggtagttcgggcagtccggtattgaatgccaaaggagaagtggtgggtatcaacttcgaccgtatctggcagggacttagttccgactacgaaactgtaggaaatgagaaaagtcgtaacatcgcagtagatatccgctatgtgttatggactttggagcaatattcacgttcccaatacatattagacgaattggacattcactaacttagtaaattctatataaaaatgttatctcccaaaacgctcaaatacttacgtttaacgcaccgttatgtatctttcatttgtgcaggcatcctgtttgtctatctcctttccggcttcctgctcaaccaccggaaagaatttacattcatgaatcagaaaaaggaacgtacggtggactatatattccagctccctgccaataaagacgattttacagaagccgatgcacgaaagattatctccgatctctcatgcaatcccgacctgtataaccgtttcagcctcagtaaaaacaaactgaccatctttggcaaagaacaattggtaatcaagttggatgcaaccagccagcaagcatttattaaagaaatgcatcgtcctgctttcctaaccgcattgaataagctacatcgcaatccgggttctttatggacaataacctccgatgcattcctcttactcatgtttattttgctcatcaccgggttactgattgttcccgggaaaaagggattgtggggcatcggcggaattctaacgataataggaattttaatacctatattgatttactggatgatagtataatttcttatttttattcatccgtatgcatctttctgtactttctttccgtatcgcagaaaacaaaaaaggacctttattcaaggtcctttttaatcacttcgtccatttcttttatacgtttctcacggtttttaataggaccgtctttcttgtcattcttgaatacgtcatcggcacggtcggcaacctcgccgctccattcttcaaactggtccttagccggacgaccattcggctcgatattttcctcggctatcgaatcatgcctgttaatcatatcatccataagttttcgttttaaaagtttatggctataagacaatacaaacgaagaaaagttttctattttaatgatttttgaagaaatcagccatgttattatactatcaaagaaacactccagcccaatctgtgtcattcatccagatacctatataaattgcagttgccggcaacgtccagtacattcagctctttcaagcgtttttccactttcttttgtgaaaccagcccgaaattccgtaacatatcacgcaacttcctaaacccatattgagaagtgatttgtagcagttcccggagtgtttttatatcagcttcagaaatgatccgctgcgaccgaatatcgaatttcaattctgtgataggagtatcaagtaaagcctttgccgcttttatatcttcgggaataaaaatttccggattcgtttcttccgcctctctcatgagcatatcattatcaaagccattttggcgggatttcatttcatacatccgtactgttgctctaagacggatattttcttccttataagtcctaaggaatcccgcttgagattttatttcctgtacaagtccctcaaatgccttctgtgcttgacgatatttcatatgtttccggacactaaaatccttaatatttccttgtaagacggtataaagaaatagttgtcgtctttcatcattccttatcattccggcaagctcttttattattaaccggatcaatggggtcaactctttcagcgattgaagtagaaaaaattcctcttcattttccttcatcttctcatccatccggcgtttgtgttcttcttcggaaagactgaaccgaatatttcgttcaagacaatccgtcagactgttttcatcaagcattagataatcgccgacttctgaataaataatctcttgccttttacaccaagtaataatacgtctggtagatacctgatacttggttgccgcttcttcaataccaatccattgttttgttgccataactcgtttgtttttagatgtatacgtcgcaaccggatataaaaaaggtgcgaacgatacatatatttcccaacagcggtactagcaaaaccgacagatgaaaatacagtatgcccgcaccagaacttatatatcgatagggatataagcttggcacggacatttgatttatcatctgtttgaaaattgctagtttcctgttagataaattaaatgtcctataaatacaagtccggctgtcaaaggtccggtccttgattgcaaatatacttcttttttctgaaaagaaagataataaatgacaagctttttagttacaatagaattttatataagacaaataagtaaacaactacacgggagaatagtttcatcggtgagaaactaaagttccatcagtgtgaaactatagtttcatcagtaagaaactaatagttccaagcaagagaaactaaagtttcaaagcgatgaaactgtagtttcgaaccgcaaaaccaatagtttcaaggcttgaaactatcggttacaaggcaggtcccgccccgtaagtacaggggtaataaataaaatagcttatctgcctgtggttaatactattcaggcaatgaaacttcatctgtgatttttacttgatttgggtatgcatctctaccataccgtctttgcagtgcgtttatctcttcttagctttgcagtgacagcattattgccgtcacagtgctatcaccatgctgctgtcacgccattaacttttcataatcaaacagttaagttacaatctgtgacagatgacagcaaatttattttttttatttattggagagagtataagttcaacttataaatgcaatatttcttttttattaatcggactttagatgcaaagttgcttatttattccgatagagttgcggacggaaaggaacataaagagtgtaattactatccgccggctttcctcccaccaatgcaggtgaccatttcggcattcctttgacaatgcggagagcctcctctgcaaattccggatgagtggaacgtagaatatgaggacgaaggataaccccttctttatcaatagtaaactcacacaaagcataacccgaaacattcttctccaaaagccctgacggataaaccatttcactggcaatatattcttccggagtcatcgcagagaaatgagcaggttcctccacctgtcttccggaaagtgtctttgaacggggacccaccggataaattccgatatacatcggccgcttataagcatccggctcttccttggtgcgctgttgcaatgcttttaataaagcagcagcctccactgccaacgtctgttcagaaatattttcccctcgggataacatataagccgactgacaaaccaacacgagacgttccatcaacgttcccttttccggcgaccatttacgtcccatctgctctttacctttagcatccgtagaagagaaaaaataaacaattccatccaaaccagccgtagaaccgtccaaatcctgtacctgctctgtcaccaaacgaaagatagcccctaaagactgatatagggaagcactaatgacaaccgatttagtatccaccgtcaccgtccccttctctgcctgccaataagtacgcgataatgtgttcgaaaccagggtataacgtccgttcctcttctctaccgacattgcatactccggcgaaaaggaagggatagctgcaaaacgcgcataaggctgtttctggaagcccgtattaagtaaagaaaacacactacgataatattcgcctaactcgcctgtataagtggaaaaaggtttcaccggctccaaatagtcaatctgggccgcaaggcgaaaagaaaaggttaaaagcagaagacagaaaacaatctttttcataagttgccggattttcggtacatatcggcaacaaagatacaaattatttcgatggttcgtgataaaattatatctttgcacggtttttactaagaaactgaataacaatacatcaaaaatatgatagctaagattgaacaacttctgaaagaggtggaagccttacacgcctccaatgccgaagaactcgaagctctccgcatcaaatacctaagtaagaagggagccattaacgacttaatggcagatttccgtaatgtagctgccgaacagaaaaaagaagtcggcatgagactgaatgaactgaaaacaaaagcgcaagacaaaatcaacgcgctgaaagaaatgtttgaaagtcaggacaacgattgtgacggactggatttgacgcgttcggcttatcctgtagaactcggtacacgccacccgctcaccattgtaaagaacgaaatcattgatatctttgcccgtctgggattcagcattgccgaaggtccggaaattgaagatgactggcacgtgttctcggcactgaactttgccgaagaccatccggcacgcgatatgcaggatactttctttatcgaagctcacccggacgtagtattgcgtacacatacttcttctgtacagactcgtgtgatggaaacttcacagcctcctatccgcatcatctgtccgggacgtgtatatcgtaacgaagctatcagctatcgcgcacactgtttcttccatcaggtagaagcgctgtatgtagataaaaacgtatcattcaccgacttgaagcaggtattgctgctcttcgccaaagaaatgttcggtgctgatacaaagatccgtctgcgtccgtcttacttcccgtttaccgaaccaagtgcggaaatggatatcagctgtaatatctgcggcggtaaaggatgtccgttctgtaaacacaccggctgggtagaaatcctcggttgcggtatggtagacccgaacgtacttgaatcaaatggtatagacagcaaaatatacagcggttatgccctcggtatgggtatcgagcgtatcacaaacctgaaatatcaggtgaaagacctccgtatgttctctgaaaacgatacacgcttcctaaaagaattcgaagcggcatattaataatgtgctaaatttaccagtatgccaatgttcccaatgaaaccgtcggacggtgatcgggacattggcatattcatcaacagaccaatcaggccaacggcgttggtttccaatcaatgcgaatcggtcgattgaacgatcattcattatggcaaaggatagactcattactcccagttattgtttcatcttggcagccaacttcctgctatacttcggtttctggttgctgattcctgttttgccgttctatttatccgaattcttccaggctggaaattccactatcggcattgtcctctcctgctacacggtggcagctctctgtatccgtccattttccggttatctgctcgacacgtttgcccgaaaacctctttatctgtttgcttacttcatctttatgatgatgttcggcggatatttaattgccggttcccttaccttatttattatattccgaatcattcacggcgtctctttcggaatggtcacagtaggcggaaacacggtagtaatagacattatgccctcttcccggcgaggggaaggcttaggttattacgggcttaccaacaacacagccatgtccatcggaccgatgttcggactgtttctgcatgatgcgggagtttcttttgctacgatattctgctatgcattcggttcctgtattttaggttttctatgcgcaagtctggttaaaacgccctacaagcctcctgtgaaacgggaaccgatctcgctcgaccgctttatcctgatgaaaggactgcctgccggacttagtctgctgctgctttccatcccttacggaatgacgaccaactatgttgccatgtacgcccgccaaataggattgaacacacaaaccggattcttcttcacctttatggcagtcggtatggccatctcgcgtatcttttcaggaaaactggtggatcgcggaaaaataacgcaagtaatagctgccggattatacctggttgttttcagcttcttcctgctttcaacttgtgtatatctgattcaatgggatgatacagcctgtaccctgctgttttttggcatcgcattattaatgggtgtcgggtttggaattatgtttccggcatttaacacgctgtttgtcaacctcgcccccaacagtcagcggggaacagcgacttccacctacctcacttcctgggatgtaggaatcggtatcggtatgctgacgggaggatatatcgcagaaataagtacatttgataaggcctatcttttcggagcctgcctgacggtagtttccgccctctatttcagactaaaagtgacgcctcattaccataaaaacaagctacgatgagaaagaaagaacgttatgagaaagtaatcgcctggtttcaggacaacatacctgtagccgaaaccgaactgcattacaacaatccgtatgagttgctgatcgctgttattctttctgcacaatgtacggacaaacgggtgaatatcatcactcctcctttgtataaagattttccgactccggaagcactggctgccactacgccggaagtgattttcgaatatatacgaagcgtgtcttatcccaacaacaaagccaaacatctggtcggtatggcaaagatgctggtgaatgacttcaatagcgaggtgccggataatctggaagatctgataaagttgcccggtgtaggaagaaagactgccaatgtgatccagtcggttgtattcaaaaaagcggcaatggcggtagatacacacgtgttccgtgtcagccaccgtatcggactggtgccggacagttgcaccaccccgttcagcgtggaaaaagaactggtgaagaatattccggaaaagctcataccgattgcccatcactggctcatcctgcacggccgttacgtttgtcaggcacgtactcccaaatgtgacacctgtggtttgcaaatgatgtgcaaatatttctgtaacacctataaagttacaaaagaggaaccaaaagccaagaataaataacgatttaatagcaaggaaccgaaataaatagtaactttgcggtcgttctaaaagaagaattttaaaaacacttttaaataaaaatagagtattatgcagacaattgacaaattcaattttgccggtaaaaaggcatttgttcgcgtggacttcaatgtacccctggacgaaaacttcaacattacagatgacactcgtatgcgtgcagctcttcctactttgaagaagattctggcagacggcggaagcatcatcattggctctcacctgggccgtccgaaaggcgttgccgataaattctctttgaaacatatcatcaagcatctgtctgaattgctgggcgttgaagttcagttcgctaacgactgcatgggcgaagaagctgctgtaaaagctgctgctctgcaaccgggagaagtgctgttgctcgaaaaccttcgtttctacgctgaagaagaaggtaaaccaagaggtttggcagaagatgcaactgacgaagaaaaagctgctgctaagaaagcagtaaaagaaagccagaaagaatttaccaagaaattggcttcttacgctgactgctatgtaaacgacgcattcggtactgctcaccgtgcacacgcttctacagcattgatcgctaaatatttcgatgtaaacaacaagatgttcggttacttgatggaaaaagaagtgaaagctgttgataaagtattgaacgatatcaaacgtccgttcactgctattatgggcggttctaaagtttcttctaaaatcgaaatcatcgaaaacctgttgagcaaggtagacaacctgattatcgccggtggtatgacttatacatttactaaagctatgggcggcaaaatcggtatctctatctgtgaggacgacaaacttgacctggctttggatttgatgaaaaaagcaaaagaaaaaggtgtaaacctggtattggctgttgacgctaagattgctgacgcattctctaacgatgcaaatactaaattctgtgctgttgacgaaattcctgacggatgggaaggtcttgatatcggtcctaagactgaagaaatcttcgctaacgttatcaaagaatctaagactattctttggaacggtcctacaggcgtattcgaatttgacaacttcactcacggctcacgtgcagtaggtgaagcaatcgttgaagcaactaagaacggcgcattctcacttgttggtggtggcgactctgtagcttgtgttaacaagtttggtttggctagcggtgtatcttatgtttcaactggtggtggcgcattgctcgaagcaatcgaaggaaaagttcttccgggtatcgctgctattcaagaataagataattgttaaaatcacatagttaattattagaagggcagttctttgtgaaaagagttgcccttatttataaaaacagaattcctcttatttataaaaacgaggtatgaaaagaccgatactattcttttggttcatccttttcttcctttactcttgtcagagtaagaaaggagatagctcttttttacctctaaccgaactgcaaccacttaccctgggcatgatgcctacactggacggacttccttttcatatagccaaaacgcaaggcatttacgactcattaggactggatttgaccattctttcattcaactctgccaacgaccgggacgctgctttccaaacccggaaaatagatggcatgattactgactatcccagtgcggtagcattacaagctattcatcatactgatttaggattcatcctgaagaatgatggttatttctgcttcattgtctccaaagaaagtaacatcaaccaactggaacagctcaaggaaaagaatatcgccgtgtcgcgcaacacagttatcgaatatgctaccgaccagctattaagcaaagccggaatcaagcatgcggaaataaacatgccggaaatcggccagcttcctctccgtctgcaaatgttgcagtacaatcaaattgatgcctctttcctacccgaccctgccgcatccatcgccatgaacagtaaacatcgttcattggtaagtacgcaagagttgggtatcgatttcaccgctaccgctttttcacgaaaagcgctcaacgagaagagagaagaaatcgagctactcatcacaggatataacctgggagtagattacataaaaatgcacccgcagaaagaatgggagcaagtattgatagaaataggtgtgcccgaaaatctgacaggactcgtcgccctccccaattatcaaaaagcaaaacgcccctccgctgaagcgatagacaaggctatacactggttgaaagaaaaccaccgaataccccaaacctactctgaaaagaatctgattgacactacatttattcccacagtatcaaccataatacagtatcaaccataatcaaaatcaaataacaactaactcatgcgaaaaacactactccaactcttaacctttgtattatgcattacaagtatgcaaaatcctctcctggcacaggagcagacaccattaaatcaagttgtcaacacactgaaagaacggattagtctctccggatatgcccaactgggatacacttatgacgatgcagcgaatccggataacacattcgacatcaaacgaatcattttcatggcacacggaaagatcaccaaacggtggacttgtgattttatgtacgacttctacaacgggggcatgttactcgaagtgtataccgattatcagtttctccccggacttacggcacgtatcggtgaattcaaggttccttataccatagaaaacgaattgtctcctactacagtagaacttatcaattgctattcacaatctgtctgctatctggcaggagtaagcggcagcgataaatgttacggaatgacttccggacgggatataggtatgatgcttcacgggaaattatttcgtgacttcctacaatataaagtagctgtaatgaacggacagggactgaataccaaagacaaaaacagtcaaaaagatgtggtcggtaatctgatggttaatccgctgaaatggttgtccgtaggtggttcgtttatccgcggaacaggacacgccatagctgactctgaatataccggaatcaaagtaggagaaaattacgctaagagacgctggagtgcaggaggggttgtcaccacttccacttttaatctgcgtacggaatatcttgccggaaaagacaggaatgtgaaaagtgaaggtttctatgcaacaggaagcgtgcgttttgcccggaatttcgatttcatcgcttcgttcgattatttcaacccgaacaaagctgcagatttcaaacaaaataactatattgcaggcgtacaatactggttttatcccagatgccggttacaggcacaatacaccttttgtaataagaaaggagacggacaaaaagattccaacctgatacaggcacaggtacaagtgaggttttaaattcaaggactaaatttaagtattaggtatcaagtattagagccgaagcatcagggttaagttccaagagtaaagtatcaaggctatagtaagtagtaccttaacaataggattaaagcagtagagttgaagcaagccgaatcaaataattataaaatataaaccttattaataacagaacaaaaatcatggaacacaaaatcgccgaaaccaacgcccgaatagacgtggccgacgtattaagaggattggcagtaatggggatcattctcttgcacagcatcgaacactttaatttctattctttcccggaagaagtcccttttgaatggatgaaatttaccgatcaggctatctggagaggattattcttcacattcagtaataaagcatacgctgtatttgctttgctcttcggtttcagtttctatattcaggacaataaccaacaacggagagggaaagatttccgcctgcgttttttatggagattattcatcctattcattataggacaattcaatgccgctttctttaccggcgaaatattaaccatgtatgcgattttaggaattatcctgccgatattctgccggatgagtgaccgtacagttgccatctttgctactttattaatccttcaacctatcgactgggcaaaactgatctatgccttgtgcaatcctgactatgtggcaggtaaaagtttggcaggttattatttcagcatcgctttcgacgtacaaaaacatggcaacttccttgaaacagtccgcatgaatatgtgggaaggacaaatggctaacatgacctgggctttggaacatggacgtatcttacaaacaccgggattattcctattcggaatgctggttggccgccgcaaatatttcctgtatagcgaacagaacgaacgcttgtggttaaaagcattagccatttcgcttctctgcttcttccccatctacggattgaacaatatgttgccggaattcatcgaacggagtgccgtccttgttcctctacagttgatattaagttcattcagcagccttagtttcatggtattactggtgacaggattactgttgactttctaccgtgtgaaagaccgcagtttctttatgcgtttcacatcttatggtaaaatgagtttaacgaattatctcgggcaatccattttcggttctcttttgttctatcattggggattcgaattgggacgatatttaggaatcacctatagcttcctttttggcatcctttttgttctattacaaatggtattctgttcgtggtggctccgacaccataaacatggtccttttgagggtctctggaaacgtttgacctggattggaaaaaataaataattaaataatgatgaacgaaaaaacgattaatgaacaatacgcatatatacgtaccttacttgaagagaaaaggctcaaggaagctctgatgcagttggaatctctgctgtggcagtgtcctgactgggatctacgcactcgcctggaacaattgcagacttcctacaaatatatgctggaatacatgaaacagggagcaaatgaccctgaacgatggaatctgtatcagaaaatggtatcagacacgtggggaattgccgaccaatcacgtttgctcatattggataacgcttcatcaagatactatcatgaagtacgacgtactcccaaatcgccagatttgtcaaactatggtcttaaaaccatattacacatactggagtcttttaatgacgacttggcagtcagcggattactgtctgacgaaaagatggatgaagtattaaagcggcatgaggacacgctcaagtttatgtttatcagaacatggacaaacagtgcctggactcccgaagacgaggaagatgcaaaagccatgcttgcctcggaattacttccgggagacgacttatgcttatttgtcagtgccctcacattgagcttgatggaatgtttcgacttacgaaaaataatgtggttgcttgatgcttacgagcatcccaacgtcaacgtcagccaacgggcattggttggtgcgatgattattttccacatttacagaagccgccttactttctatccggaactgataaaaagggtggatctcatggaagaaattccttcattcagagaagatgtcgctcgcatttaccgccaaatgctattatgtcaggaaacggaaaagattgacaaaaaaatgagggaggagattattcccgaaatgctgaagaatgtttcctccatgaaaaatatgcggttcggctttgaagaaagcgatgaagagaacaacgacatgaatccggattgggaagatgcattcgagaaatccggactgggggataaattgcgtgaaatgaacgaattgcagttggagggtgcagatgtatatatgagtacttttgcggctttgaaaaactatccgttcttccgcgaggtgcataactggttttatccattcagcaagcaacagtctaatgtgctcaaggcaatgaagcaggcaggaaatgagggaggcagtctactggatttaattcttcaatcgggattcttcagtaacagtgataagtactctctctttttcacgatccatcaattgccacagtcacaacaggatatgatgttgagccaactgaatgaacaacaggttgcagaattggcggagaaatcgaatgttgagacgatgaagaaattcaatgaacgtccgggaacggtcagcaaccagtacctgcacgatttgtatcgtttcttcaaacttagtgtgcgcaagagtgaattcagagatatttttaaagagaagctcgatcttcatcatgtccctgcactcgacaatatattgcactgggaagatgtattattccccattgccgatttctacctgtcaaaggaacgttgggacgaggctattgaaatttatgaagagttggaaacgattggcggattcgaaggagagagtgctgaatattaccagaagtttggctatgcattgcagaaaagaaagaaatatgcagaagctatccaggcttacctgaaagcagacacgttgaaaccggataatatctggaacaatcgccatctggctatttgttatcggttgaacagaaattaccaggtagcaatcacctattataagaaggtagaagaagctgctccggaagataccaatgtgactttccatatcggtagctgtctggccgaattggggcaatatgaagaagcactgaattatttcttcaaactggatttcatcgagaacaactgtattaaggcatggcgtggtatcggatggtgttcatttatcagccagaaacatgaacaggcgatgaagtattatgaaaaaataatagaacaaaagcctctggctattgactatatgaatgcaggacatgttgcctgggtgatgggagatattcagaaagcgtccgttttctatggaaaagccattacggctagtggaaaccgggaacgattcctggaaatgttccataaagatgaagaagctcttctcacacaaggaattcgggaagaagatattcctctgatgttggatttattatagtcttccacatctttcagtttgggatattcagtaaatgttcctgcttaaaaatacagaaaaaggctgcctcattttctattttgaggtagcctttttgcattattggactaagtatatcttgtgtatttcatgtaatcaataagttaattacactgatactaatatattcagatatattcaagatacttactacagctttttcaactctccgtacagtttctgtatgggaagccccataatattatagaaactaccggaaattgatttaaccccgatatacccgatccactcctgaacgccataagctcctgccttatccattggctgataacgatctacgtaatacaggatttcatcttccgacaagacatcaaacaatacttcggaggaagcggtaaagcttttttgccactcagtagtagtcaggcaaacccctgtgaaaacctgatgagattttcccgagagagcgcgaagcatttcaatggctccttccctaccctccggtttcccaagtactttcccatctaaccagactatggtatctgccgtaatcaataattctcccggcttcatcatggtacggtaggcatccgccttttcacgggcaatatattcaggtatttcagcacctaccaatgtatccgggtatgactcgtctacatccggcaatgttctgactacatagtctactcctagtcccgacatcagttctttccgacggggagaattggaagctaatataatctgatatttatttaagttatcaagcatggttttattcgttattaaacaacgattatttatgattaagttaccaaccgaaggcgtcttccaccatccatagaccgtgagctttcagcacctgctccactacatcacgtccgcatccacgaccaccgtctgcataagaaatatactttgcaacggatttcacttccggcacggcatctttcgggcagcatggcagtccgcactcacacatcacttcaatatccggcacgtcatcacccatatatagaatttcatcatcggtcaatccgtacttatcacgaaaagcacgataatcatgtatcttcacagcagaacccatgtataaatccttcactcccagtccctcaaaacggatacgtaccgcttctgtccggccaccggtgatgatagctatgtgaagtccttttttcacagccaactggatggcgtacccatctttgatattcaccgtgcgcatcggttctccggaaggatgcaaaggtacggttgtcgaactcaatactccgtccacatcaaaagctaaagctttgatacgggataaatcataattgatggtgctcatggatacttttgctcattagtttatatatttcctgcaatgccggagaatctaccaacatggcaagatgattactcatcacattctcatcgtaacgaacagcgggtccggtctgtgcatcacgtggcgccaattcgtggactttacgtgctgtttcatctatcagcggaagcatgacatcgaaaggcaagttgtatttttcaagcaaatcagctgctaatgcatacatgtgattggtgaagttacagataaaaacagcagccaaatgaaggctcttacgttgctcggaagaagcctcgtagaccttttccgaaagtgtggcggcaacagccttcaacaattccacgtcttccggccttttcgcttcaacaaagaaaggcacttcctgaaatttaacttcacgttgtttgctgaatgtctgcatcggataaaatactccgtaacgttctgcatgcccttcccaaacgctcatcggaatgcttcctgccgtatgcaccaacaaagacgcttgctttccttctgttatctgcggtaacaaatctactaaagcatcatctttcaacgatacgatatacaattttgcatctttggagactgcctgtaaatctgttgtatattcagcttctactttctcggctaaggtacgggcagattccatagtccggctatatacctgtacaatgcggaaacctttacgataaagagctttcgccagattagtagccaagttacctgcaccgataaacacgatcggtgtatcttctatacttcttttcattattctcttatcgttttgcaaaccagaataaaacgattccgatgatgagcagtgtcaatggcaacagatatccggataacgaacccaataaggacatgaccaaaccgatattcatcactagccaaagcccaagcaacacaaaaccaattgatttatcgcgtttgaaaataaggaaacagatcgaggcgtacaatagcatattgtccttattcatcacccaaggcagtccaatggaagagaaatgaatcagtttatcaatcagataaagtgctccgataacgataaaggtaacagcagtagccagataggtatctttactattattcgctttagcagctcccatacttattttcctccgaacttgttaatatgaattttctcccattgaagatgttcttcattgaaaggtttacgttccatccctttatgtccgatagcaatgacagaaagaatctgaagttgcaagggaatatccaaaattccatggacaaattcatcggaaggcattccggtggcagtgaaacgttcgcgaacctgcacccaacaacttcccaagccaagatcttcagcctgcaactgtatcatgatggaagcaatggaagcgtcttcaatccaaacatcgctggccaacggatcggccattacaacaatcgccaaagctgcatcggcaatgaacgaagaagcctgttctttgcaatgagacaattctttcaatacctctttatcatcaaccactacaaactgccaactattactacgtttggaagaaggggacatcaaagctgctttcatcaacgcaactacctgatcttgtgtcaattcttcatcggtgaacttccgcatactacgacggttctttattaattcactgaaattttccatattatttccggtttcatttgattaatgtatgcaaagataatgcaaaccgagcgtaataggaaataaaagtttatactaaatgaagaatatattgtatctttgcacagagaaataatttcattatgaaaaagcgaattacacaggacgattacgttaaagcgaatcgtaaagctagccgtgaggcagaaattgagatgtacgggcaccctatttgtcacaaacgagtgcaccagtcaaagaaagtatataaccgcagaaagataaaggcagccgataaaaagctgccttatttttttgtcttcaaaatagcgtcactatcctccagacatagcgacactatacaatagaaatggcgtcactatcatgataggatagcgtcactatatttaggggattaaaaaagaagtttatctatttacctatctatctaataatctatacaatccgagttaattctccggtcgtagaatcaataataaacccgtagactgtcacatctgaagggatcaaaggatgacgcacaataaaatctaccgttcctctcaccgacttttctgtatcttcgaaaccatccagccacgaatgaaagtcaactccgcagaaacgcatcatatcaatataatccggattgattccgcgtgctttcattttttcgagcattacttcactgtgcatgtggcaagctccacagtcagaatgagcaatcaccattatttcctctacccccaactcaaaaatagctacaagtaaactacgtatcacgctaccgaaaggatgggaaataacgccacctgcattttttatcattttcacatcgccattcttaattcctaatgctgctggcagcaaagcagtcagtcgggtatccatacaggaaagaatagctattttcttatcgggatatttattggtaatatacgattcgtatcccttgttctcaacaaattgcttgttgtaagctaaaatttcttctaacatagttccgctttttaaaagttctgttcgattacacaaagatatagaaaaaagggacatatcatcacgacatatcccctctttaatctaaatttaatctgtaagagtactaatacccattgtttccatattcttctgcattatcaatctgactcaagaagttaaaagaaatcggacgcaaataatgcttgttttcatcaaaattttcagctgcacgaggattaccaacagcaagacgttgtttgaaagaatctttgtgacgcttcatcaatacccaacgttgatattctccacataattcacgagcatattcgtccataacatcattctgtgtagcattactcaatttcatagcattgtaagatgcatcattgcgagcggcacgctttttcagtacatttaaatattcagcagcttttccgccatttcctaattgttggttagcttcagctgcaatcagatatacttcagccatacgcataatgaacacatcacctgtcttacgttgcaaattgctactatatgaatcttccgacaaccaattgtatttgttgaaaccagggtacatatttttgtcattagtgacttttatatctgttttacgatattgtccgttatcaaacaaatcatcaatattgattacataatatctacgtttcgctttctccgcatccgaaagtctttcctttgataagtagaaacagattctatcatcatcttcagctacagggtaaggtatcacataggggttcttcacttcctgcaatttggaaggatcaccgctattttcacctttcggccaaaccttggctatcattttgggcgcccaagttccatcataatatgtataattcaaatcaccataaggataaatatactcattatggaattttgcatccaatccataagtatcgattatattttgagtaagaattgtaaatgaactaatattatcatttacgccatgttttgttccaatttttggttttgtaccatcatccaatgtctgcttcttattagtaaataaataactacctcctgactgtacggcagaaaactgtacaaaagccgtagtaaaggttacttcccaccgcttatcataatcagcatcaaaacaatccagcaaatatttggaaggtgccaacgtattattattggtacgtccataccaataattctgattatccggagtaggataaatagtgagagtatttggctttggatacatataagtaaagttattattacattgtgttccagcattccaattctccaaattcgtagcatccggaccggcagcaataaataaagcttctttattatttcgattatttgccggagcccaaacatcttccacatcatcatacaaacagtcaccatacgctaaaatcatgtcctctgccacttctttagcacgttgccaataagatactccatcttctgtcagcccatattcgccaccaccttgagcataaacgcgagccaaaagtcctaacgcggttttcttagtcacacgcgcacgattactatcataaggagtatcttcaagattattggccgcaaatttcaaatcatcaattatctgcgtatatagttcttcaatagagttacgctgcggagtcaaaataggatcttgagacgattcttccaatgttaacgttacatttccatacgtattcaccaatatggaataataaaacgcacgaagacagcgggcttcagccactaaagtcgttatatctttttcattgccatccgttagtaattcagccctgtttactactgcattacaattaccgatcatagaataagcctgaccgaataatttatttgtagcattcgtattcgtagctaaaccatcataataaatcacctgcttggcataatccggattaccggcaggagttatccagcagtccgtaccaccttcagccacagacaagaaatcatagacactgaataactgcccgtaaagtgatgaataacaataagactgtaatcctttaagcccatcgaacgttgcaagaatttcatctcctgttttttggcttggattatactcatcaagcgagcaggcagacattgaagccacagcgaatgtaagcgctgctattttatagattgtacttttcatttcaatactttttttagtgaaaaactagaatgtaacatttacaccaaatacaaattgtttggtcaatgggtacttcagagaaccattcatttccggatcatagtctttcagcaaatggcttttcgcaaatacaaacggatttgtaatggtagcatagaaacgacacttctctataccggctgattttaagatagatttcggcagactatatcccaatgtaatgttcttaatctttataaacgaaccgtctacatagcgtaatgcgtaatatcccgtatattgttcgagacctttattagcattggcggcaggaaaatcatttgaagggttgttttcagtccaataattgaaataggtcgggaagttacgtatacccttcgggtcataagacgtcaacatatcataagcaaacatctgtccgtaacgtgcataaacaaacacacttaaatcaaaatccttccaggtaaaattattctggaatcctaaagaccaatccggagagttgtgacccagaatttgataatctgcatcacttggagtatatttattatcagaagtgtaataaataacattaccattttcatccacagcagcactacccgtttcttcatctattttatagaatctaccatcagattcttttactaaattaggtatattgattttcaaatcaccaggtgcagcaccaaataccgccgcatcagtttcctcacctttttgccatacaccatccaacttataatgataataagagttaatagcttctcccaatgccaatgcataaccggtgtcaccattattaagcacatctgaatctccaccggacaatttggttattttctctttattatgattgaaagttacacttgaactccaggtaaagttctttgttataatattacgtgtattaagagccaactcaaaacctttattgctagtctcacacatatttaaattagtagtataattcgctttaggtccgccatccggggagaatgctccattaataacaggaagtgccttgttccatataacatcttttgtttttgtattataatattccatactgacatcaatgcgattatttaagaatgcagcgtcaataccaatattcgtgttatacgacttttcccatgtaagcaaatagttcggaatattctgtgagaatttataaatcggtgtcagaacacctcctaatatcatatttacagcagtagcatccaatgatgcagcagacgaatacggatcaatccccgctgtactacccgtaacaccatatccgaagcggattttcagattactcaaccagttagtcgtactctccataaatttttcatcagaaattctccatcccaaagaaaaagccgggaaagtatcccatttattaccttctgccagtctggaagagccgtcatggcggacagatgcagcaaataaatacctacccatatatgaatagttcaaacggccgacatatcccatccccttagacatactataagaagtacttcccgaagttgcggaattaccatcaagaatattatgccataagaatttattatcagaaacacctttttgatacaaagtagtgacatcgctacgattgtgattccacgatgtaactgcagtaagagttatatcatgcactttcttaatctggaaattgtaagtaagtatattttcccacttataattatacgaacggttgtccttaacttgcgccttaatgccgtctgccgtttgatttgccttataccattgaacagacccctctcctgtgaaagtgttactacgtgaatatcccaaattagcaccagcacgagtaataaaagtcagtcctttaagaggagtgatttccaagtaaggattataatagaccttaaggttttgagcctgattgcggtacaaacttttatcctcatttaaaagataattatatactgtagatgaaggatcggcaacaggttgcggattgatgcttccatcttcattatacaacgatccaagaggatttgacgccatcaaagtctgtaaatcagaatcagctttattttgatgtacataagacagttgagcatcaatgcccaccttcatccactttttaatcttatgatctacccggattttagatgaataaagtttataactatcttgtgcaaactgcccatcctcattagagaagttcagagaaaaatatgcctttgtattttccgttccaccagccacagaaacagaataattctgtgttacactggttttcaacaaagcatccacccaatctatatattggccattttgatgtgcattccattcagcatcagtagtaaacagatttttatcatcagcaaccgagctccaacgtccatcgccagcaccaacagatgcatctctcaaggtttgtatataactttctccactacgcatctccggagtccttgaccagccgtttacacctacgtatgcattaaaattaacaattgctttgccttccttaccacctttagtagtaattaaaataacaccgttcgcaccacttgaaccataaatagctgtcgaagaagcatcttttaaaacttcaatgctttcaatatcattcggattcaatgtagaataatcccccggcataccatcaattataaataaaggatttccggaatccttctggaatgaccggttaccacgcaactgcatctttactcccgaaccggcctgtcccgattcacgcgtaatatccaatcctgccaccttaccttgtaaagcctgcatcggatttgaacttggattcatcactacatcttcactttttacagaagtgatagctcctgtcaaatcgcgttttttcatcgtaccgtaacccacaacaaccacttcatccaatgcctgtgtgtccgaaaccattttcacattgaccggtccgttgcccgtcacagtcaccgtttgttctttgtaaccgatataagaaatgaccagttcttttcttcccgccggaagattgatagagaagttaccgttaaaatcggtaatcgtacctgtacttgttcctttcacaacgatagaaaccccaatcaacggctccccgctttcatcaatgatagttcctttcacagttttcgtttgtgtgacaacttgcaccatagtattagaaactccatcttctgcatacacagaatatgacagaggggcagacaataaagacagccctaaaatcatggaagcgcgtctatgatgattcttccatgcttcaacaaatgcattacatctcattcgttctaatttaaagttaatattaattctcgttgttttgcaaaaactattcgattataatcttaattaaagacgaatctaattttaatacgtactcacttttcataccatatttctcctataaaatatattttctccattaaatacgcaactatatattatactttacttcaagcagctccaacaaattctttattttgttgttgaataaagaataaaaagtgtaaatttgtacctagatgccactgaaactaacaacatattatcatgggaaggatattcctgaattgccgggaaaaaataccttccattccaaagagttatttctgatttatgaagcaactcctgggtatactcctttattaatagtggcaacagaagacggcagaccggtggcacgcctgcttgctgccatccgcaaagcaaagaagtggctcccttcttctttagtgaaacattgtgtagtatatagtgaaggcgaatttctggacgagtctctttcgaccaacaaagaaaaggcagaagaagtcttcggcgatatgctcgaacatctcacacaagaagcatcgcgcagctgtgtcctgatcgaattccggaacctgaacaattcgatgttcggctatcgggttttccgtgccaatgattatttccctgtcaattggttgcgggtacgcaattcgctgcacagtatgaaaaagacggaagaccggttcagtccgtcgcgtatgcgtcagataaaaaaaggactcaagaatggagccagagtagaggaagcacataccgtggaagagatacacgatttctcacggatgctgcacaaggtttattcctcccgcatacgcagatatttccctgccaacgactttttccgccacatgaacgatatgttaatcaaaggacaacaggcaaaaatattcgttgtgaaatacaaagagaaaatcattggcggttctgtctgtatctattcgggagacgacgcatacctttggttttcgggaggaatgagaaagacatacgcacttcaatatccgggtgtgctagctgtttggaaagcattggaagacgcacaccaacggggattccgccacatggaatttatggatgtaggacttccgttccgtaaacacggttatcgtgatttcgttcttcgcttcggaggaaaacaaagcagtacccgccgttggttccgcgtcaattggagttggctgaataaactcttagtcaagttttatgtctaaatgtaatctcaagattacaaaacaatgttttatgctcctttcccaccattttttctgtttaataatccaataattaaatgcagaaatatttctttattagataagaaatgtctttctttgtgctgttttatgccttataagcacagatttaaaaccaaataaaaaaagtatagttatgaagatttcacacattgaacatctgggcattgctgtaaaaagcatcgaagaagcccttccttactacgaaaatgtattaggtctgaagtgttacaacattgaaacagtggaagatcagaaagtaagaactgcttttttaaaagtgggcgaaacaaaaattgaactgttggagcctacttgcccggagagtactattgccaaattcattgaaaacaaaggtgcaggcgttcaccacgtcgcatttgctgtagaagatggcgtagccaatgcgctggcagaggcagaaggcaaagaaatccgccttatcgacaaagctccccgcaaaggtgctgaaggtttgaatatcgctttccttcacccgaaatcaactttgggtgtgttaacagaactctgcgaacattaatcataaactctaaaaccaacaagaactcatgagtaatcaacttgaaaaaattaaagagcttattgaacgccgtgccgtagcacgtatcggaggcggtgaaaaagcaattgcgaagcaacacgaaaaagggaaatacacagcacgcgagcgtctggctatgctgcttgacgagggtagcttcgaagaaatggacatgttcgttgagcacagatgcacgaacttcggcatggagaaaaaacattacccgggagacggtgtagtaaccggctgcggtacgatcgaaggacgtctggtatatgtgttcgcacaagacttcactgtttctgccggttcactgtcagaaacgatgtcattgaaaatttgtaaaatcatggatcaagccatgaagatgggcgctccctgtatcggtatcaacgactcgggtggtgcacgtattcaggaaggtatcaacgctttggcaggttatgcagaaatcttccaacgcaatatccttgcttccggtgttatcccacagatttcaggtatcttcggtccttgtgccggcggtgctgtttattctccggctctgaccgacttcacgctaatgatggaaggtacttcttatatgttccttaccggaccaaaagttgtgaagaccgtaacaggtgaagacgttagccaggaaaacctcggtggcgcaagcgttcactccactaaatcaggtgtgactcatttcaccgctaaaacagaagaagaaggtttcgaactgattcgtaaactgttgagttatattcctcaaaacaaccttgaagaagctccttatgtagattgtacagacccaatcgaccgtctggaagattctttgaatgatattatccccgacagccctactaaaccgtatgacatgtacgaagttatcggcgctattgtggacaacggtgagttccttgaaatccagaaagattatgcaaagaatatcatcattggtttcgcccgtttcaacggacaatcggtaggtattgttgccaatcagcctaagtatctggctggtgtgctcgacagcaacgcatctcgcaagggtgcacgtttcgtgcgtttctgcgatgcattcaatattcctatcgtatcgttagtagacgtaccgggattccttccgggaacaggtcaggaatacaacggcgttatccttcatggtgctaagctattgtatgcttacggtgaagctactgtgcctaaggttactatcacattgcgtaaatcttacggtggttctcacatcgtaatgagctgtaagcaacttcgcggtgacatgaactacgcatggccgactgctgaaatcgcagtaatgggtggagcaggagcagtagaagtattgtacgcacgcgaagccaaagatcaggaaaatcccgctcaattccttgctgaaaaagaagcagaatacacgaaactgtttgccaatccttacaatgcagccaaatacggctacatcgatgatgtgattgaaccacgcaacacacgtttccgcgtaatccgtgctttgcagcagttgcagactaagaaattgagtaatccggctaagaagcatggtaatattccgttgtaatcctacttttcacattaaaacaagaacgattatgaacaaaaccaaaatcggaatattcctttctttgctgttgctgattgggctgacttcttgtggagagcaaaagtcgaacaacaagctggtactgaacgaaatcctgatagacaatcagaataattttcaagatgactacggattgcacagcgcatggattgaaatattcaataaatcattcggtagcgccgacctggcagcttgcttgttgaaagtaagcagccaaccgggcgatacagttacttactttatcccgaaaggtgatatacttacattagtgaagccacgtcaacatgcactattctgggcagatggcgaacctaaccgcggtactttccacaccagcttcaagctgaatccggaaacggccaactggatcggtctgtttgactccggtagaaagctgctcgaccagattgtagtgcccgcaggtgttcttggccccaaccagtcatacgctcgtgtcagcgacggagcagcggagtgggaggtaaaaggtggaagtggtgacaaatacgtgaccccgagtacgaacaacaaaactcttgacagcaatgccaagatggaaaaattcgaagagcatgatgctgacggtgtcggcatgtccatctctgccatgagtgtagtattctgcggattgattcttctctttattgccttcaagattgtaggaaaagtagctgtaaatttgagcaagcgcaatgctatgaaatctaaaggcattgacaagcatgaagctaaggaactgtcacaggctccgggcgaagtttacgctgcgatttctatggcattgcacgaaatgcaggatgaagtgcacgacgtagaagaaacggtactgaccatcactcgcgtaaaacgcagttactcaccatggagttcgaagatttacactttgcgtgaaactcctcccagaaagtaagtcaccttttaaaaagttaaaacgatgaaagaatataaatataaaatcaacggtaactcatataaagtaaccatcggagatattgaagataatatcgctcatgtagaagtgaacggtacacactataaagtggaaatggagaaacagccgaagcctgctgccaaacctgtaacagtacgtcctatgcctaatgctcctactgctcctactcaggtagtgaaaccgactgctccgtctaccggaaaatcaggagtgaaatctccgctgccgggtgttatcctcgacatcaaagtgaatgtaggcgatactgtaaagaaaggacagaccattatcatattggaagccatgaagatggaaaacaatatcaatgcggataaggacggtaagattactgccatcaacgtcaacaagggagactctgttcttgaaggtaatgacctcgtaattattgaataatatgggagattttataaactttttaggaaataacctcgccgacttctggacatacacgggctttgcaaatgctactgtagggcatgtcgttatgattcttgtgggtttggggttcatctatctggcggtagccaaagagttcgaaccgatgctgctgattcctatcggcttcggtatgctgatcggtaatataccttttaatatggatgccggactgaaagtcggtatttatgaagaaggttccgtattgaatatattgtatcagggagtaacttccggctggtatccgccgctcatctttttgggcatcggcgccatgacggacttctcggcacttatctctaatccgaaattgatgttgatcggtgctgctgcacaattcggtatcttcggtgcttacatgatcgcattggaaatgggcttcgacccgatgcaagccggcgctatcggtatcattggtggagcagatggcccgacggccatcttcctttcttccaagctagcacctaacctgatgggagccattgcggtgtccgcctactcctatatggcgttggttccggtgatacagccgcctatcatgcgtctgctcaccaccaagaacgaacgtgtcatccgcatgaaaccgccgcgtgccgtttctcacacggagaaggttattttcccgattatcggcttgttgctgacctgcttcctggttccttccggtctacctttgttgggtatgctgttcttcggtaacctgttgaaagaaagtggtgtaacccgtcgtcttgccaatacagctagcggtccgttgattgatactatcactatcctgttgggtctgacagtaggtgcttctacgcaagcttccgaattcctgacgctcgattctatcaagattttcgccctcggtgcattgtcattcatcattgcaactgcatccggtgtaatcttcgttaagatattcaatatcttcttgaagaagggcaacaagatcaatccattgatcggtaatgcaggggtttctgctgtccccgactctgcacgtatctcacaagtgattggtttggaatacgattcgaccaactatttgttgatgcacgctatgggtccgaacgttgccggagtgatcggttcagctgttgctgccggtatcctgctcggattcttgatgtaagatataaggaggctgtttgaacagttcttaaaataaaaaataagactatcctaaaagccttgaatttataaaaatcacctttgctacattatagtagtaaaggtgatttttcattataaggacttgctgtaaaaaagactgtagctaccatgccccatgtattgtattgcgcactgttgtgttaccttctcttatcattccgttaatctatccaaaataatctacgaataattcgtaaatataatatttttagtaacttgcagcagataagtcaaacaactaaaataaaatattatgaaacggattatcattctgttctttctttgttgtaccattcctctaatagcgcaacacacagaccctattcaagaagctatggcaaactacgattatgagacggccctttctcttatagctcaaaaaaagactacccctcccctgctattacagaaaggcaaagcgttgcgtggactaggactcaccacagaggcacttgctacctatcaagaaattatctgtaatgatactacaaatactcgtgctttcattgaagcggccgaatgttgccgagcactagctaaatacaatcaagcactaaaatattatgaacatgcacttgatctgaatccggaaaacaaatatgtacgtattcaatatatcagcttgcttctctcccaacagaagtttagcgaggcgcttggtgaaagtagtctgatgacagaaaaagacagttccgccattgtcctgcatctacaagctcaaagctttgaaggaatgggcgaacttcttcccgctgcaggttgctattacaatatccaggctaaatatcccgacgattatctggctgccagcaaactaggcgctctaaatatatccggttcctatttcgacgaagccatcgaagctacagaaaaataccggcaaattgacagtaccaacatttccgtcaaccggcagaacgctttagcatactgcttgaaacaagactaccccactgccatccaacgttatgaatatcttgtcagccaaggagacagttcttttcatacttgttattatttaggcatcagttactatgcagcagagaagtactacgaagctcatgattttttggaagtcgcccgtaaatatgatcccaacaatatcaatctcctttattacctcggtcgcgcctgttccaaaacttcctggaaaaaagagggcgtagactatctggaaaaagccattgatctatccattcccaaagatagcagtatgactcgactttacatcgggatgaccgactgttacaagatggcacaaatgtacaaagaacagattgcatccatcaaagaacgctaccagcggtatgacaaacaaaaccacaaactattgtatgacatggcctatatatacttctatgacttgaaagataagaaaaatgcggaacgctatttggaagcattcctaaaaacacgtcctaaagacactaaagaagaagcggaaatgaacgagagaggcgaacttgttttaggaaaatccaattattataatgccgccgccaactggctgaaagatattcaaagtaaacaaaaaatagaagacttctttcaaaattcctctccacaacttcctctcccaaagaaagataaatagataagaactataaagcaactaaaaggctgctaccggtttatcggtagcagcctttcttttatttatggaataatccggagattattactgtgccaatttgttgtcagaaccgagcacattcagaattttgtgcttgtacagtttttccatattgtcacgagccgggccaagatacttacgtgggtcgaattcagccggtttttcagcgaataccttacgtatagcagcagtcatagccagacgagagtcagagtcgatgttgattttgcaaacagcagacttagcagctttacgcaattcttcttccggaatgccgatagcagctttcagtgcaccaccatatttgttgatagtttccacttcttcttccggaactgaagatgatccgtgaagaacgatagggaatcccggaagtttttccattacagcgtccaatacttcgaaagccaatggaggaggaaccatacggccagtcttcgggtcgatgtggcattgttccggagtaaatttgtaagcaccgtgagaagtaccgattgagatagccaaagagtcgcaaccagtgcgagtagcgaagtcgattacttcttcagggtcagtatatgtgtgatggtcggaagaaacttcatcttctacaccagccaatacgccaagttcaccttctacagttacgtcaaactggtgagcgtattcaacaactttcttagtcaatgctacgttttcttcgtaaggaagatgagaaccgtcaatcatcactgaagagaaacctgaatcgatacaagatttgcaagtttcgaatgtatctccgtggtcaagatgaagaacgatttccggatgtgcgcagcctaattctttagcatattctacagcaccctgtgccatgtaacgcaacaaagtagcgttagcatactgacgagcacctttagaaacctgaagaatcacaggagatttagtttcaacagcagccttgatgatagcctgcatttgttccatattgttgaagttgaatgctgggatagcatatccacctttgatagccttagcaaacatttctcttgtgtttaccaatcctaaatctttgtaatttaccattttgtttaaagtttattgttagtgaataaaaattctacgcaaaagtaagcattatccatcgaataacgaacatcggaaagaaaaatatagtagaaaaaggtttaaatcagactgcaaaatttagcaggaatacgagtgtgacattagattgtaatgtccaccttgcaaactttgggatttatgatttctgaattctgattgatgccttcggatttatatctccttatttataccttatttttcattcatttgatcaccaaaatctgcatagccaatcagaaatcagaaattataaatcagaaattttagaaaacctttttctatttcacagaaaagcattatctttgcgctctgaaaatgaccattacactatttcttaccaaaatagtaacagaatataaattaaaaaaacagatactgaaatgaaaaaaggccttcatccagaatcataccgtccggtagtatttaaagatatgtcaaatggtgacatgtttttgtctagatcaactgtagcaactaaagaaaccatcgaattcgaaggtgaaacttatccgttgctgaagattgaaatctcaaacacttctcacccgttctatacaggtaaatctacattggtagatactgcaggtcgtgttgacaagttcatgagccgttacggtgaccgtaagaagaaataattcgatctttcgtgaaagatgaaaaaagaggagattctcgcagagaatttcctctttttcgttttctatattccttaacgtcaagcatcatccaacaagaaatcggctatatgacgatgcctgacaccctccacattatcctgccacaagctgtccatgctaactacatatttaggataatggtcgttaatggcgagcaaaggagcaaactccctctcaacagttgcctgtgaagctaactgatacgttacttgcacataaatcttttcttcccgacggatggctacaaaatccacttctttatcatcctgtttgcctacatacacttcataaccccttcttttcaactccagacagaccagattctccaacatacctgcaatcaaccggtcacgatagcccatcacggaataaatcaaagaaaggtcgcttacaaaatacttctcattcgtctgcagaatttcctttcctttaatatcataccgggaaatacgttgaatgataaaagcactttccaatgcattcagataattatagatggtattcatatccaccttccgttgctgacttttgaagtaatcggctatatttttagcgttcagcttattgcctatattatcgaaaacaaacttcactacccgttcgagcagttccacattccggatattgtgacgctgcaccgtgtcacgaagaatgacagaagaatagatgtcgtagacaattttatagatagcctcatatccataatcggcagtatgtatggccggaaatcctcccatacggagatatttctgaaattcctccttccggttgagcgtcggatcattggcctgcaagtcatggaaagtcagatattctctaaaagacaaggtcatgacatggaaagcgacataccgtcccgttaaataagttgccagttcggacgataacatacgtgagttggagccggtcacataaatatccgtatccaaatctaccagaagtgagttgaccactttttcccaaccgtccacttcctgaatttcatccaagagaatataatatttacccgcatctcctgcctgcccccgaatataagcatacaaagccttcgcctctttcagatctatccactgaaaactttcaaaattcagatagatgatacgttcttcacgaactcctctcctcaacagttcgtcacgaatcagacgcagcactaccgactttccactgcgacgaatacccgttatcacttttacaaacggcttatctataaaaggaacaatttgttccatatactgttcacgattaatcatattcaaaagtttttagggttataagcacaaagatatactattttcggaaagtttttagggttataagcataaataaatccataaattcagattcttttagggttataagccgaaaaataaataaaagaaatatgactgaatccgatttattaccaaataaagaaagtacctttaccccaataattaataaaaaatggaaataaccgatttaaaacaaatgacaaaggaagaagtttttaatttcatcagacaacgcctttctttcagtaaagaactgcaagaacaattcagacatgtgaataaagacgatctcgcaaaagaacatcgcagattcgaaatgtccggaaatgaatcaaagacaggccaatgcacgattttcaacacagcgattctgaacgagtttgccgatcttggcatctatgattatacttcttacctttttctcgacttccacaatggcactccaaccgtttatctcaaatatttctccgaaaatgaaaatttggaatatacatttaccggatataccacaacggaaatcatctttgcaattcttgaactgactatcttctccggaaagcccaaaagaaatcgcagctaaaaaaaagaattgcacggaaagacaatgcgaggtcaaaagacttttatggctttcatttaggcacggattacacggatttcacggttccattagactaaaagccgcgaaatccgtgtaatccgtacctaaataatatcaatctaatagatggtttcacttttggctccctcctttttatcatcacattatatttgccacccgtatagcatatttaccatctttataccatactctctattctcataccatatttcctgcatttatttcctcttttccatcctattccgaaaaaaacatatatctttgtcacacgctttctgcccatcagcgtgatgaaacaggcaaaagcggtttttattccttaatggagtaaataacgtattgtctctcaaacttaaaaattagcagttttttcacaccgagagatgatacaacagatactccacgtagatagtcgtatatcaacatatcgattagagatttgttatatataaacgtttggcgtgggtgtctgttgtttatcattatctggtgaagggtattgctaagccttaagtttagataatggtacaacagcactcacgcttttattgtatccggtcggtttcaacaatccttataccccaaccaattccccacccgaccgaaatcataaaaatcgtgggtgttcgttgcacctctccggacaatacattatttactcctttttttataacacattaaaacaaaagcaatatgccaaaatggattagtgtagaaaaagcagtgattaagtatcacatcgaaaaagaagcgatcctgctttgggtggaaatgggacaatttcctatgttatacatagacaatgttccgaacgttgacgaagaatgtattctggaactctttcgccgaagtaaagccggcattacagcagaatatattgatacactggaacaactgtgcatagataaaacaatggtctgcgagaaatacgcccacattattcaattgaaagaaaaggaaattcagctgcagaaggaaataaatacgttgataaacgaaatacaggcagcaatgaagagacaaaatgaacggatccgggatttgaaaaaagcgattggagagaataacaacgttatacgtagtgacagttggataaaaaggctgcgcaaaaggtttcaatggtgaataattatcagcgtaccaattaccatgtgggacacaacgtaaacaattagcatattggcacattattgcacggtttttaccacagaggacacagaggtgaatttggtttatgacttacgcttgtgaccctaattttgatgcgtaatcctcctctataaagttgaaaaaacatgaaaacatctgccacctgcaaccaaacgcgtgtaatgcactagttgataaatagttagagcgttgcagatacctgcggcagataggttgcagataaagtatctgcaacacagtataaaccttacataagctaattctccaggagggcaaaagtttattgtatacataaacttcccgtttccaggcggggaactgtcgtttccggcattagaaattacaatttccacggcaggaaacgaaagtttctaagacgggacactacagtttccacgtaaggatactgtcgtttccccgtagagacaccaccatttctccatagagtcaccccaattatcccatagctttgcacaaaggaatcaaggctttttctttgattatataacgtgttgcagatactttatctgcaacctatctgccacaggtatctgcaacgttccaactatttattaactagtgtattacacgcttttcgttgcaggtggcagatgtttttatgtttttcaactttatagtaggaaaaaatttcattcatttctgcaccgtttcattcatttttgcactgaaatgagcaaaatagtgcgattttagtttatttctgcacacttctttgctaaatgggaatttatatttcactacagaggacacggaggacacagaggttaactattttttattcactatagagtaatacagagtaatcgtatttatcgctctgttttgcttacggaaagagagagaagaactctgtgtcctctgtggtgaactcgtaaagttcccgttttttttgtgttccatataaaggttaagaggcaggatatgaaaagacaggaatgttgaacataaataaacaggagttgttttagtatattattcgctatttatcaacgcaaaacctctaaacatcaacgtggtatatgaaaaagaattttggattcgtcctggcggctgcaatcttgcttgctggctgcggacagaaaaaagaaacgacaacgacaactgcacgtcccgtaaagactacgattgtcgagtcaagatcgattatcagaaaagatttctcgggaatcgtggaagcggtggaatatgtgaagctggctttccgagtcaacggacaaatcatccagcttcctgtcatcgaaggacagaaagtgaaaaaaggacaactcatcgcggctatcgaccccagagacattgcgttgcaatatgccgctacgaaatcggcatacgaaacggcttcggcacaagtggaacgtaacaaacggctcctctcccggcaagcgatctccgtgcaggaatatgaaatcagcctcgccaacttccagaaggcgaaatctgaatacgaactgtctgccaacaatatgcgcgacaccaagctgacagctcctttcgacggttctatcgaaaaacgactggtggaaaactatcagcgtgtcaactccggtgaggggatcgtgcagcttgtcaatacacacaatctgcgtatcaaattcaccattccggatgcgtatctttatttgttgcgtgccaaagacccgcgtttccttgtagagttcgacacatttaaaggacacgtgtttcaagcgaaactggaagaatatcttgatatttctacggatggcacaggaattccggtcagcatcacgattgacgatccgtcattcgaccgcgatctgtatgctgtgaaacccggtttcacgtgcagcatccgtttcacggcagatgtaggtccgttggtgcaggatagctggacgatcgtaccgcttagtgccgtattcggtgaaagcgaagggaataaaatgtatgtctgggtggtagaagacaacaaagtccacaaacgggaagtgaccgtcaacgccccgaccggagaagcacaggcgctcatctcggaaggtttgaaacccggtgaaaaaatcgtcatagcaggcgtataccaactagtagaaggagaatctatcacaactgttgacaggtgatagttggtaaatgattaagtatcatttatccgctgtcattcatcaattatcaacgatcatttattatgagtttagccaaatattcattagataatacgaaaatcatctatttctttcttgctgtattgctgattgggggaatcacttccttcggcaagctgggtaagaaagaggatgctcctttcgtcataaagtcggcggttattatgacccgctatccgggtgccgaaccggcagaagtggagcggttgattaccgagcctatctctcgtgaaattcaaagtatgagcggtgtgtacaagataaaatcagaatcgatgtacgggctctcaaaaatcacattcgagttgcaaccttccttgtcggcaagctccattccgcagaagtgggatgagttgcgacggaaggtgctaaatatacagccacaattgccgagcggtgcttccgcaccgacggtttccgatgatttcggcgacgtgttcggtatctattacggtttgacggcggacgacggttacacatacgaagagatgcgcaactgggcggaacggatcaagacgcaggtagtgacggcagacggggtgatgaaagtcgccctgttcgggacgcagacggaggtggtcaatatttttatttccaccaataagctcgtaggtatgggcatcgacccgaaacagcttgccagtctgttgcaatcgcagaaccagattatcaataccggagaaatccgtgccggcgagcaacagctccgggtgaccgccaacggtatgtataccaccgtagacgatatccgcaaccaggtgattaccaccaaagccggacaggtgaaactgggcgatatcgccgtcatcgaaaaagggtacatggaccctccatccaatatcatgcacgtgaacggcaaacgtgccatcggcatcggcgtctccaccgacccgcaacgggacgtggtgcaaacgggcaagaacgtgaaagccaaactggacgaattgttgccactgatgcctgtgggactggaactgcaaagcctgtatctggagaacgaaattgccaacgaagccaacaacggatttatcatcaatctgatcgaatcgattctgattgtaattgtgattatcatgttggtgatgggtttgcgcgcaggtgtactgatcggctcgtcactgattttctctattggcggcacattacttatcatgtctttcttcggtgtcggactgaaccgtacatcattggcgggatttatcatcgccatggggatgctggtggataacgccatcgtggtaacggacaatgcacagattgccatcgcccgcggagtagaccggcggaaagcgctgatagacggcgcaaccggtccgcaatggggattgcttggggctacgttcatcgctatctgttcgttcctcccactctaccttgctccttctgccgtggcagaaatcgtgaaaccgctttttgtggtgcttgccatctcgctaggattgagctgggtgctcgcgctaacgcagaccactgttttcggtaatttcatcctgaaagcgaaagcaaaggacggcacgaaagacccgtatgacaaaccgttctatcacaaattcgcctccatcctccgcacgctgattcgtaggaaaacattgacactgggttcgatggtagtgctctttgttgcttcgctggttatcatgggaatgatgccgcaaaacttcttcccttctctcgataagccttatttccgggcggacgtgttctatcccgacgggtacagcatcaatgatgtagtgaaagagatgaaatccgtggaagagcatctggcaaagcagccggaagtgaagaaagtgtcgatcaccttcggcagcacaccgctaaggtattacctggcttctacttcggtaggtccgaaaccgaattttgccaatgtattggttgaattgacggacagtaaatatacaaaagagtatgaagaagatttcgacgcgtacatgaaggcgaattatccgaatgcgattacccgtaccagtctgttcaaactgtcgcctgcggtggatgccgctatcgaaatcgggtttatcggtccgaatgtagacacgcttgtggcgctcaccaaccaggctttggagattatgcaccggaatccggatttaatcaatgtacgcaattcgtggggaaataaagttcctgtatggaagcctgtatatagtcccgaacgggcgcaaccgttaggggtatcgcgtcagggaatggcacaaagtatccagatcggaaccacaggtatgacgcttggagagtaccggcagggcgatcaggtgcttcctatcttattgaaggataacacggtggattcgttccgcatcaatgacctgcgcacgttgcccgtgttcggcacggggaatgaaacgaccagtctggaacaggtggtatcggaatttgatttccaatatcgtttctcgaatgtgaaggattacaaccggcaaatggtgatgatggcgcaatgcgatccgcgtcgcggagtgaatgcgattgctgctttcaatgaggtttggccgctggtgcagaaagagataaaagtgccggaggggtatacgatgaagtatttcggggaacaggaaagtcaggtggagtctaacgaggcgttggccaagaatttaccgttgacgttcttcctgatgttcgtcacgctgttgttcctgttcagaacgtatcgtaagccgacagtgatcttgttgatgttaccgcttatttttatcggtatcgttttgggattggtgttgctaggcaagtcgttcgacttcttctccatccttggtttgctcggattgattgggatgaatatcaaaaatgcgattgtactggtggaacagattgatctggaagcaaagacgggcaaaaagccgttggatgctgttgtcagtgctacaacgagtcgtattgtccccgtagcaatggcgtccggcactaccattctgggtatgttgccattgttgttcgacgcgatgttcggcggtatggcggctacgattatgggaggtttgttagtggcttcggcactgacattgtttgttcttccggtagcctattgtgccattcaaagaatcaaaggctgattgccttctcttatatgaaacttgaatttattgtttagattgaataaaatgaaaactcaacttataactctgtctctgctgctccttggcctcacagccggagcacagcagccctatcttagccgggaagcttaccgggataaagtggaagcttacagtcaaattctgaagcaacagaaactaaagacgatggcaagtacggaagcacgaaagattgctcacacgggattcttgccaaaaattgatgtcaatgcggacgggacactcaacatgagcgaccttaatgcctggaacgaaccggtaggcgaataccgcaaccacacctatcaaggtgtatttatcgtctcgcaaccgttgtacacgggcggggcactcaacgcccagcacaagattgccaaagcggacgaaaagctgaatcaactaaatgaggagcttaccatcgaccagattcattatcagagcgatgcagtttattggaatgcttccgcttcacaggctatgttgcaggcggcggacaagtatcaaagtattgtgaagcaacagtatgacatcattcaggatcgtttcaacgacgggatgattagtcgaacggacttattaatgatttccacccggttgaaagaagcggaattgcaatatatcaaggcgcgtcagaactatacgctggcgctgcaaaagctgaatatcctgatgggagaagagccgaacaatcccgtagacagtctgtacacgattgacacggcttccgctccggtgcagatactttctctggagaatgtactgcaacgtcgcgcggattacgaaagtacggaagtaaacatcatgaaaagtcaggcgcaacgcaaagcggctcttagccagttcaacccgcaattgaatatgtatttcagcggtggatgggctacagctacacctaacctcggttatgatgtttctttcaatcccatcgtcggcattaacctgaatataccgatcttccgttggggagcccggttcaaaacaaaccgtcagcagaaagcgtatatcagcatacagaaactgcaacaaagttatgtgacggataatatcaacgaggaactttctgccgccctaaccaaactgacggaaacggaatatcaagtgaaaaccgccaaagagactatgaatctggctaatgaaaatcttgatttggtttctttctcgtataatgaaggaaaggcaaacatggtggatgtgctctccgcgcaattgtcatggacgcaggcgcacaccaatctgattaatgcgtatctgtcggaaaagatggcggtagcggaatacagaaaggttatcagtgaataaatttagaaacaaaagaaacttgttcacaaagtcttagtcttataaaagaaaatcgtcctgccatcacgcaaccgtgaaacaggacgatttctttttatatcataaggactacaaaataccgttttgcttcaggatatcttctatttccttatctgtgatatttgcacgttctgacttatcataaatagtgagcaattttatctctgtatctatttctgtccagattatcgtataggttatcacccgtgcacctccacttttacctttatttttcgaagttatcgctatacgtattttacgaagattattgcccaaactgactccttgttcaggatttaataacaaatcatttccaaaattcctaagatcttctttcaacgatttataccgttttgacaaatgcttcatttcccttaaaaattcgagggtaacgcttattctatatttcattaagggcatcatctaatgacttaaactccaacttaccctccagattcagtttcagttccttacacgcctgatctaagcttgccagaatctccgcctttgtctggtagggagctgcttcctctgcgacaacattcgtttgctcttcttcacaactcaacatcgatttcactctccgcagaatagcgacatcatccacatccagaatccgccgaatcagttcgttcttttcggcttccaatgacattgcactcatacgcttgctatttttactgttatacattcacacaaagataacgctatcaaacgaatcttccaagtgtgaatgtataaaaagtctttttcaggcaggaattaccttacgcaaggaaggagatcaacacacccgcagctacggcagaaccgattactccggagatgttgcttgccatgcaatactgcaatacgtgattcttcggatcgtatttcaaagcaatctcattggctacacggctcgccatcggaacggcactcaaaccagtggcgccgataagcggattgattttcttcttcgagaagagatttaccagtttcacaaagaaaataccaccggttatagaaagtgcaaatgcaaggaatccaccgatcacaataccgattgttgtccagttgaggaatgcttcggctgtcatcgttgctcctacggacagtccgaggaagatggtggcagcattcattatgctattggaagcggcatcgaacaagcggaatgtgttggttccgatttctttcaccaggttaccaaacatcaacatccccaccaaaggcactgcacttggcacaaagagggcaacaatagtagttaccacgatcggaaagataatcttcaatacacgcaggttcttgatttcagtcttcgaagggtacttcttttcctgttctttcatgttgatgctcaactctttcttcgtacagaacagcttcactaccagcggaataatcaccggaacgagcgccatgtacgaataagcggcaatggcaatcgggcccagcaaatgcggcgccagtttgatggtggtaaagatggctgtcggaccatccgcgccaccgataatgcccagagaagcggcttcctgtggagtgaatcccatcaggatggctaccagcaatacggtaaagatacccaactgtgcagctgcaccgaatatagaaagatgcaggttacgcaacatcggcccgaagtccgtcagcgcaccgacacccataaagatgatcggaggcaggaaacctgttttaatcaacatatagtagatgaagttcatgattcccagttcgtgggcaatgtcatgcaaaggcatttcccagatgttcttcaacactccgtttaccatcaccataccattttcgtcggcctgaatcacgcccatatctcctccggggaagttggctagcaacacaccgaaagcgatggggacaagcagcaacggctcgtactgtttcttaatacccaaatagagcagaacgaacgcgatggcatacattatcaggaactgcggttcggcaatgatattgctgaacgcagtcatgtcatataagttctcaaatatttcgttcattatcctatcttcattaatacgtcatcttctgaaacagcatctcccgggttgacacagatagcagtcactgtaccgccaaactctgcacggatggcattgtaggtcttcatcgcttctacatagcagattacatcaccttctttcacagtgtcacctacttgcaaaggagtttcctgcgcacctttcactaagaagaacttgccttccaacggagaaagtacttctttaccctctcctgccggagcagcggcagcacccgcaggagcaacaggtagttcggcatcaccgtatgctaccgtcacacgataagcctgtccgtccacttgtacggtcagtgtcttcggtttggcatcttcttccggagatttatctttttcggcacgacgtttggctacgtcttccaggaagtcttcttttgctttgccactcttgtaagcctcatattgagccgggtgcatagcatattcgaagagttcttcgtcgtcctgtcccacttcccatttgttctctttcatcagtttgcgatatttgtcgagggcatcgggatagttattctgcggatcaccttcaaagaacttacggccttcacgctctgccttttcaatgatttcgggagcaagtttgcccggcagacgtccggctttacccagaatcatatcccaaatatcatcggcaatcattccccaacgttcttttcctttttccatggccatcacattcatcatggcgaggttcttcacgtattggctgaacggagtcaccaatggaggataaccgacacgaggccatacgtaagctacttcatcaaagagcttgatgagcaactggtcttgcgtcataaacggcagattatgttttgccttatatttattgattgattccagattggattcaaggtcggccatcaaactacccatcataccgccgggaagtccgggagcaatcagcaaggagttcatcaggcggtttttcgggctgatatacaagccgaggaagtcgtccataaattcctgaatcatgccgcgcactttcatgtaggcttccatattgatttcgggcacttgatatccggcgtctttcagcatcgcctgcacactaagcaagtcagcatggcctgttccccatgatagtggttccatgcctacgtcgatgtagtcgcaaccggcttcgcatacttcgaggatgcttgccatattgaatccgggacctgcatgactgtgatactgaacggggatttcgggatgtgccgccttgatatttgctacgatcttacctaacgatacgggacgaccgatacctgccatgtctttgatacagatttcgtctgctcccagtttgatgagttccagcgccatattggtgtagtactctacggtatggataggcgaatgagtgatgcaaagcgagcattgcgaaatcatgcctgcttcctttgcgtatgtgatggaaggagcaatgttacgcacgtcgttcaatccgcagaacgtacgggtaatgtctgttccttgtgctttctttactttgtagaataatttgcggacgtctgccggaacggggctcatacggagtccgttcagtgcgcggtcgagcatgtgggtttgaataccggcttcgtggaacggttttgtccattcgcgtaccgctttattcgggttttcaccaaacaataaatttacctgttcaaaacctccgccgtttgtttctacgcgggcaaaacagcccatttcaatgatggcaggagctacctttacgagttggtctacacgaggtacgtattttccggcagattgccacatatctcggaaaaccaaactaaactttacttctcttttcatgtctttcagtgatattctttatagatttataatttttctactttagtgatttttcctttaccttgtgtcaccacatttacagcagctgtaatggcggctaagatgtttcccggaacaggggcaggaccttgcgatgcttcccgcttcacaggaaccacttcttcaggagcatacttgttgactaatgtaatcaacaacttacctaaataaatcacaatcagcagaataacaaacacggtagccattccgaccaccatcagcaggatcgctgtttcgatattttccatataataaactattagtattttaagttgttcgtctaaaaagcgtccgaaaataccaaatttttattataaaataaattaataaaggaatataatgtataaaaacgtcatttctctgattggaaaactggggaagtttatgatttataatttatgatttatgatttatgatttagcgtgccatccacatctaaactaaattcccatttatcttatttactatctgcttctattgcacaacccaaatagtaaatggtaaatagtccaatagtaaatcgtcctatctatcgtttctacaaaaaaatgtgagagaaagcccctcaactttctctcacattctgataaaacaattattaaataaaaatactcaatgatagaccggttcagcccttttctggtttcatactctcttaacctactattaaactaccagataaaaccggtcttgttaaacctctcatgggccatcacggctttcattcttttaattagcgtagcagtctagttgaaaaacccttttttaagccaactaagtctgtttaatcggaaaaacaagcctctaaagctcatatcacgtccgatgagggaatctttccggcttacgtttgtggcaggaataattcatctgccgctgtctattgtttgctttgagccctagtttgcatttcttttaaaacattgtttgttttgggttaaatttaaattttataaaaagcatctattgtttgttttgagtttagcttgtaattctctataaaacatctattgtttgttctgaatcccggccttatttctgccggataatttctaatttcttctactacaacatttaatcttctaatcaattctaccgttttcttcaaatatcattaaatagctcatctattagaaagagaagcatctgttgtttttttaccaagaaaaaatgaagaaaatttgaagaaaaacaaaaaagcctcttctgactatccagaagaggctttttttattgcaaaataatttctttccctcgaatttgataactgattccacacgatccaaagactttttccagtgtggcgttcaggtctttcgttaagaccgtcccgttgtaggtcagcccctcgcatttctcatgtccgacgactgttacttcaaatatatgctcaatatctgccactacatttattagcggatcgtcttcataccccaacacctcggggaactccgattcttctgcctttttctctaccggcacaatcttgttctcatcgcaatgaacgctttccccggcaagcaatgtacgcttacctacagcagtctcgacttgcacacttccttcctcacagttgacggtcatcttctttccttgctgatcgatgaggaatttcgttcccagtacggttacgtcgccggcttctgtacggaccgtgaatgtcttgcctttggttacgttaaaagaggctttacccaatagttgcaatttgcgctcccaaagccatgtgatatgattgtaagtcaggcgggaattttccatcacctgcacagtactgccatccggcaattcatagttcatagcagtgttatcagtcaccaccttttcttctgccaggaagtaaccgcctatccccaaaagaaggacaactgccgctgccactccccatgagaaagagaaacttctccccgcaccttgctttcttctccggcttaaggcgatcttatggctctcctcacgttgcaacttcagcttatcacctatttcttttttacgagaaaagatttcgccaaccagaggaagttttccttcttctaagtatttatctaaagattctgtccacttttccatatctcacacctcaattaaaaatccacaaattagctgctaccaacaacaagaaagatttgctcatacgctcccgcaaactggagatagccatatgagtagtattgtaaaccgtacgtgaagtgagtcccatcacctgggctatttcttccggactcatcttcttatagtacttaagatacaatacctcccgctgttgctttgtcaaattgttcagctctttctgtaaaacttccagctgttctttttctaactctgaacggataatagcagtttcaatatcgatctccaaatcaaactgatattcgcttgtgcctacttcatccagtgattttaatgagccactattctcttttttcagttcgttcactatcatgtgtctcaacgaaacacataagtaagcgggtatggattgaggggccgcgcaagtttctcttttctcaaagatgtaaacaaacaacgactgtatcgcctcggttaccaaagtctcatcaccggctatcttcatgccatatccatacagtaaatctgcatattgctcataaagctgccggaatgcctcttcatccccttgctgaattttatcccaggatagtgtcttcatttatattcactcatttatatgagatatgtttttcctttttttacctgattttttagttaaaatcaacggaatatgttttaaaactcacttgtaaagtggaatttgatgtgtttaaagtccatctgcgccatctgaagtacataaccggagtctgccaggaacacatcgcgcccttctctatccttcgccatatactggtatttacgtttcttgaaagcttccagttctgcgggatcatcgctttctacccaacaagccttataaaggcttactggttcccaacgacaggacgcattgtattcattcaacaaacgatactgaatgacctcaaattgcaactgccccaccgtaccgataatcttacgaccattgaactgattgacaaacagctgtgccacaccttcatccatcaactggtcaatgccttttgccaactgtttctgtttcatcgggtcggcattctcaatatacttgaacatctccggtgagaaactcggcaatccacggaaatggagcatttcaccttctgtcagcgtatcgccaatcttaaaagtaccattatccggtaaaccaataatatctcctgcataagcttcgtcaatcgttgttttacgctgtgccataaactgggtaggcgacgaaaaacgcatggtctttccatgacggacgtgtgtatatggagcattgcgaacaaacttaccggaacaaatcttacagaatgccacacaagaacgatggttgggatcaatgttggcggttatcttaaagatgaatccggtaaatttcggttcgtcaggtttcacttcacgctcttctgcctgtacaggacgagggctgggagctatctctacgaaacagttcagcaactcttgcacaccgaagttgttcagcgctgatccaaagaatacaggcgcacagtctcctgccaaataggattcagaagcaaattccggataaacaccctcaatcagttccaaatcgccacgcagcttgtctgctaacgacttgccaatctgctgatccaattcttccgaatgaatatcgactgccactttctctgttaccatctgtttggatggctgatacaagtccagtttctgttcatagatattgtatacccctttaaaacgtgctccctgctctatcggccaggacaagggacgaacctgaatcatcagttcttcttcaagttcatcaagcaaatcgaacgggtcttttccttcacggtccattttgttgacgaagataattaccggagtctttctcatacggcacacctccatcagtttacgcgtctgtgtttccacacccttcgcaccgtctacaacgatgataacactgtctacagctgtcagtgtgcggtatgtatcttcggcaaagtcctggtgaccgggagtatcgagaatgttaatcttatagtcccgatagtcgaattccatcacggaagtcgttaccgaaataccacgttgtttctcgatttccatccagtcggacgtagccgtctttttaatcttattactctttactgcgccagctacctgtatctgacctccgaaaagcaataacttttccgtcaaagatgtcttaccagcatccggatgtgcaataatggcgaacgtccgccgtctcaaaatttctgtattatctgccatagttttttagttagaattatgaattataaaatatgaataagctatgctggaataacatagcctagattcattattcatctttcataattttatcaatgcattgtttgaggctctcctcccaatgaggaatctctatatcgaacgttgtttttatttttgttttatcaagcacggaatatgccgggcggtttgctttcgcgggatattcggctgtatgcaaaggtttcactttgcaggtggttattcctgccagacgatgaatagctaccgtgaaatcataccaggaacaaactccctcattgctgaaatggtagataccgcgaacaatacctttattaataatagcatagatggcccgtgccaggtcattggcatacgtcggagtcccgatctggtcgaaaacaactcccaggctgtcacgctcttttccaagacgaagcatcgtctttacgaaattattgccaaaaatagaatagagccatgcggtacggataacgactgcttgctcgcagtgattcattacctccttttctccttccagtttagtggtgccgtatacagaatccgggcaaggattgcagtcttccgtgtatggagtatgcgcagtaccgtcaaatacatagtcagtagatacttgtatcatggcagcaccattggcttgtgctgcacttgccagttgtttcggtgcttcacaattcaatttgtatgctaattcttgattatcttcagctgtatctacagctgtataagcagcacaattaacaacaagctcaatctgcttctctgccatataagtccacacagcttgcttgtcgcagatgtcgagttcctgcacatctgtgaaataatacgtatgttgcgggttctctttcgcaagcacctgcatctcattgccaagctgaccgttggcacccgttactaaaattctcatttattcatccagttttaattcacctttacggtctttatcataataatttgccaacatagaaaggaaactagtgatagcttccactgccttggcagttccttcgctgatagacttcttttgaagacgaagcaggagtactccatacaacgcttcaaaacaggtttccagttcgggttcatctttcttgccgtttttattccgtaattctacgataaacggtaatgccttgaaataagcagcactgtaaaaaggaaatttaggagaagaggacaatgcgttgtgcaactctgtcagattgataatcacgtttttattaatctgcagatgacccttttcccgtactccttcctcgcccatcatcgtaatcaggttggtataccattctcgcatggcaggccgctgttcttccggatagcgggcaattacatttgcctccatctcttccggttcacaatgattggcacggatcaagtcttcctcttgccacatatatataaggtattcggcaatattcttctctttcagttgttgtgctatctgattcattatgttatctcttaataaagtgactctcccaacaaagtataaatcaatccggcaacagataccagcattacgatacttcctacaacacgattcagtatccagataccacgtaaattgaatttagtgcgcaccttattcacaaaataagtgatacccaaccaccaagtcaatgctcctatagcaattgcaagatatcccgtgatctcttcaaagaccagcactcccggctgcacaaaggcaaaacgggcaaaaagtccgataaacaggaagattatcaaggggttggatagagtgacgaaaaaggcggtaataaaattatggaaataagaacctttgctggatgaagccggacgaatggattgcaccggattgctacgaaaggtatatataccaaaaaggagtagcatgacactccccaataactgcagatagaaaatattcttattgatataatcgaacacaaaactcatcccataaccggtgagcaaagcgtatgctatatcgctcaacgaggctcccagccccgttacgaatccgtaccaacgccctttattcagagtcctctggatgcataatacgcccaccggaccgaggggtgcggacacaacaacgccaataataaagcctttcactaatatatcgaatatggtctctatctgaatcatgtcgcaaatatcgcacttttttgtgatatggggatagtatattaacgttttttccacacaagaatcactatatatagcgataataagtaaaacgtacatcaaaaataaacatattaaataaggtataggaatttattctctatttttttcctaccaccaacgaaattgattatctttgcgccacagaaaaagagaagagtttctcctgcaggaacttcaatcgtaaaatcgtaaatcgtaaaatcgtaaatatacaacatgattctttttttcagaaccccttccaagagcgtgattgccgtagagagcaaccatcagctcacccctgacgaaagtaataaactctgctggctttttggcgaagccgtgatggaaagtgaagaaaacctgaaaggctgtttcgttggcccacgccgcgaaatgatcactccctggagtacaaacgcagtagaaatcacccaaaacatggggctcgaagacataagccgcatcgaggagtacttccctgttaaggacgaaaatgccgattacgacccgatgctccaacgcatgtacaaaggactcgaccaaaacgtattcacgacaaaccgtcagccggaaccaatcatctacattgaagatctcgaagtgtacaacgaaaaagaaggtttggctctttccaaagaagaaatggactacctgaagaaagtagaaaaggacctcggacggaagctgaccgactctgaagtattcggtttcgcacaaatcaactccgaacactgccgccacaaaattttcggcggaacgtttatcatcgacggtgtagagcaggaatcttccctgttccagatgattaaaaagactacacaggaaaatccgaataaaataatctctgcttataaagataacgtagccttcgctgaaggtccggttgtggaacaatttgctccggcagatcattcaaaacctgatttcttccaagtaaaggacatcaagagtgttatctcactgaaagcggaaactcataacttccctactactgttgagccattcaatggtgcttctaccggtaccggcggtgaaatccgcgaccgtatgggtggtggtaaaggttcatggccgattgcaggtactgcagtctacatgacttcttatccgcgcaccgatgaaggacgtgaatgggaagaaatacttccggtacgcaaatggttgtaccagactccggaacagattcttatcaaagcatccaacggtgcttccgacttcggtaacaagttcggccagccgctgatctgcggttcggtactgactttcgaacatacagaaaacaaagaagtttatggttacgacaaagtaatcatgcttgccggcggtgtgggttacggcacacaacgtgactgtctgaaaggcacaccggaagcaggaaacaaagtggtggtaatcggtggtgacaactatcgtatcggactaggtggcggttctgtatcttctgtagataccggtcgttacagcagtggtatcgagttgaatgccgtacaacgtgctaatgctgaaatgcagaaacgtgccaacaacgtagtacgtgctctttgtgaagaagaggtgaatccggtggtttctatccacgatcacggctctgccggacacgtaaactgtctgtccgaactagtggaagaatgtggtggtttaatcgatatgagcaaattgcctatcggcgataagactttgtcggcaaaagaaatcatcgccaacgagagccaggaacgtatggggctattgattaaagaagaagccatcgaacatgtacgtaagattgccgaacgcgaacgcgctccgatgtacgtagtcggtgaaacaaccggcgatcatcgtttcgccttccaacaggctgacggtgtacgtccgtttgatcttgctgtagagcagatgttcggttcttctcccaagacatatatggtagacaaaaccgtggaacgtcattacgaaatgccgaaatacgaattgtctaaattacatgaatatctgacgaatgtattgcagcttgaagctgtagcctgcaaagactggttgacgaataaggtagaccgttcagtaacaggtaaagtggctcgtcagcaatgccagggtgaacttcagttaccgttgagtgactgtggtgtcgtagcacttgattaccgtggcgaaaaaggtatcgctacctctattggacatgctccgcaagcagcactggccgatccggctgccggctctattctttctgtatccgaagcactgactaatcttgtttgggctccgatggcggaaggtatggacagtatttcgttgtctgcaaactggatgtggccttgccgttctcaagaaggtgaagatgcccgtctgtacacggctgtaaaagcattgagcgacttctgctgcgcattgcaaatcaatgttcctaccggaaaagactctttgtctatgacacagaagtatccgaacggtgagaaagtgatttctccgggaactgtgattgtttctgccggcggtgaagtttccgacgtgaagaaagtagtatctccagtattggttaacaatgaaaagactacgctttatcatattgacttcagcttcgacgaactgaaattaggtggttcggctttcgcacaatctttgggtaaagtgggcgacgaagtaccttgcgtacaggatgccgaatatttccgtgacgctttccttgccgtacaggaacttgtaaacaaaggattgatccttgcaggacacgatatatctgccggtggtttaatcacgacattgctcgaaatgtgcttctctaatatagaaggcggtttggaaatcagcctcgacaagatgaaggaagaggatatcgtcaagattctgtttgcagaaaacccgggtattgttatccagatcagcgacaagcataaggatgaagtgaagaagattctggaagatgcaggcgtaggctatataaagctgggtaaaccgactgacgaacgccacattttggtatctaaagacggtgctacttaccagtttggtatcgattatatgcgtgacgtatggtattcttcttcttacctgctcgaccgcaaacaatctatgaacggttgcgcaaaagcacgtttcgaaaactataagatgcaacctgttgaattcgctttcatgccggaattcaaaggtaagctttctcaatacggtatcactccggatcgtcgtaccccaagcggtatccgcgcggctatcatccgtgagaagggtacaaacggtgagcgcgaaatggcttactcactctatttggcaggtttcgacgtaaaagacgttacaatgaccgacctcatcagcggacgcgaaacactggaagacgtaaacatgattgtttactgcggtggtttctctaattccgatgttttgggttctgctaaaggatgggcaggcgcattcttgttcaacccgaaagctaaggaagcattggataaatattatgcacgcgaagatacattgtcattaggtgtctgcaacggttgccagttgatgatggaactcgaccttatcaacccggaactgaagaagaaaggcaagatgttgcataacaattcgcacaagttcgaatcacgcttcctcggccttactatcccgaccaaccgcagtgtgatgttcggctctttgagcggaagcaaactgggtatctgggtagctcacggagaaggaaaattctctttgccgtatgacgaagacaaatacaatgtagtagcgaagtatagctatgatgaatatccgggcaacccgaacggttccgattattctatcgcagcattggctagtgcagacggacgccatctggctatcatgcctcacttggaacgttctatcttcccatggcaaaacggttgttatccggcagaccgcaagaacaacgatcaggttactccatggatagaagcgtttgtcaacgctcgcaaatgggtggaagcaaaaatgaaataaatcatttctatatttacagaggctggtacattttaaagtgccagcctcttgtttcacacaacttttcgctctactgaaagcccctttacagataccaaaattccgaaaacaaacaatatgtataaatacctataaaatagtctgttttctttcattttaagaacgctgttatctttcttcaaaattttgtaatatcggaaaatcttcttaattttgtcaaactttccccctcattaaagattcaataacccttaaaagtcctatttgtatgaaaaaatggctttttctaatcttattgtttcctctaacttgtgtcgcacagacgtatcgatatattggagtggaggatgggttaagtaaccggcgggtttactgcattcaaaaagataaaaccggctacatgtggttccttacacacgaaggtattgatcgatacaacggaaaagactttaaacgatataagttaatggatggtgacgtagaagtgaactctctgttaaatctgaattggctttatatcgaccaagaaggagttttatgggaaatcggaaagaaaggtaaagtattccggtatgaccagattcacgactgtttcaatcttgtatataagttaccgatggaaagcttcagtgaacaaccggatccgatcacctatgcctggcttgacgaaaacaaacatatctggctatgtaataaggatacaatcttcctctacaacacggagacccaactggttacccatataaggaacgatatcagtgaagagatcacagatattgaacagatagacgagtcgcatttcttcatcggcacagaaatgggtattcattacgccaagttggaaaataacgcattggaacttatcaattgcgataagctggagagcctgaaagcccagattatcgatttatatttcgacaaaaagattcgtaaactattcatcggaacttttctacggggaatcatgatttacgatatgaataccaaatctgttatacgtccggaacagaatttgaaagatattagtatcacacgattcagaccattaaatgataaggaattactgatagcaaccgacggtggaggagtacacaaaatagatgtagacacttatcagataacacctgaaattgtggctgattacaacagtaacaatggcatgaacggtaacagtatcaatgacatctttgtagatgatgaagaacgggtatggctggctaattatcccatcggaatcaccatacaaaacaaccgttataccggctacaaatggatcaaacactccattggcaataaacagtctttaatcaacgatcaggtgaacgccattatcgaagacagagacggagatttatggttcgcaacgaacaatggtatcagtttcctcaattcaaagaccggacaatggcgttcggtgcttagctcttttgaagaatcgcaaggtaataaaagccatatctttcttaccgtatgcgaagtagctcccggaataatctgggcaggtgggtactcttccggtgcttaccagatagataaaaagacgttcagtgtcagctatttcatgccgcccttgtacactcacagtaacaagcggccggataaatatatacgtgatatccgtacagatatgcagggctatatctggtccggagggttctataacctcaagcgcatcaatctaaaaacgcaggacgtacggttttatgacggattaaattccattaccgccattgttgagaaggatgaaaaaagcatgtggatcggtagtgctgccggcctgtgccttttagataaagaatccgggaaatttgaacgtatcaaacttccggtagaatcgagctatatttactctttatatcaagcaaaaaatggttcattatatataggtaccagcaggtcgggactattgatttacgatgtcaacaaaaaactgttcactcattaccactctgaaaactgtgctttaatatccaataatatctacactatattatcggatgcggacaaagacatcataatgagtacagaaagcggactgacaagtttctatcccgaagaaaagaaattccataactggaccaaagatatgggactaatgaccacccatttcaatgcgctgtcgggtgtgttacgaaaaaataaaaaattcatttttggtagttcggacggagccgtagagtttgacaaggacatgaaattacccagaggttattcctctaaaatgattttcagcgatttcaagcttttctatcagacaatctatccggatgatgaagattctccgttaagaacaagcatcaatgaaacaaaggaactgaagttaaaatacaatcagaatattttctctttgcaggtttcttccatcaattatgactatccttccaacatcatttattcttggaggctagaaggtttttatgatgaatggagcaaacccggaaccgaaaatacgattcgttacaccaatcttgcgccgggcaaatatacgttaagagtacgcgccatctccaacgaagacaaacgcatcgtacttgaagaaagaagtatggacattgttatcgcccaacctttttggctgacaatctgggctatgctgctttatgcggctttcctttgtctcattgccatcattctattacgtaacttgattttaagaaagcagcgtaaagtctccgatgagaaaatacacttctttatcaatacggcacatgatatccgtaccccattgacgcttatcaaagcacctttggaagaactacgcgagaaagaggagttgagtaaagaaggtatttcgaacatgaatacggcattacgaaacgtaaatgccctattacgtcttaccaccaatcttatcaactttgaaagagcggacgtatattcttccgaattatatatttcagagcatgagctaaacacgtttatgaatgaaatattcaacgcgttccagcagtacgccaacatcaaacatatcaacttcacttatgaaagtaatttcaggtatatgaacgtatggtttgataaagaaaagatggaatctatctttaagaacatcatttcgaacgcactgaaatatactccggaaaatggaaatgtacaggttttcgtttcagaaacatctgactcatggagcgtggaagtcagagacacaggaatcggcatcccggccaatgaacaaaagaaattgttcaaacttcatttccgtggcagcaatgctattaattccaaagtaacaggaagtggtatcggactgatgcttgtatggaagctagtccgcctgcataaaggaaagattaatctgtcaagcatcgaaaaccagggatcggttatcaaaataacattccctaaagacagcaagcgcttccggaaagcacatctggcaactccgagcaaacagcgtatagaaaatacgattgataacgttccgcctccatcacctgaaatttacgaaaatgcacaaaagaaagagaacattaatcatcgtcgcatcttgattgtggaagataatgatgagttgcgcaactatctgtcgcaaacgttatccgaggagtatttcgtacaggtttgctccaatggaaaagaagcattgacgattattcccgagtacaaaccagagctggttatttcagacattatgatgcctgaaatgcggggggatgaattatgccaagctatcaagaataatatcgaaacctcccacattcctgttatcctgctgactgctttgaataatgagaaagatattctctcgggacttcagattggtgcggatgaatacgttgtgaagccattcaatattggtatattgaaagctaatgttgccaatctgctggctaaccgtgcactattgcgcagcaaattcgcaaatttagatctgaatgatgaggaaaatgatgaagactgcatcaactgttcgcaagacattgactggaaattcatagcaaacgtcaaaaagaacgtggaagataacattgacaatcctgctctcacggtagatgtattatgcagcctgatgggaatgagtcgcacaagtttttacaataaattaagggcattaaccgatcaggcaccgggagattatatccggctgattcgtctgaaacgtgccgtacaattactaaaagaagacacacatagcataacagaaattgcagaaatgacgggattcagtgacgccaagtacttccgcgaagtgtttaagaagcattttaatgtgagccccagtcagtatggcaaagagaaaaaaacagctagtaaggaaggaggagaaaagaaagaatgaacatttatctcgaagcatttggaatcttttttaaaataggcgcctttaccattggaggagggtatgcaatggtgccactgattgaaaatgaaattgtcaccaaacggaaatggattgcgcaggaagattttatcgatctgttggctatctcccaatccgcaccgggaattttggcagtcaatatttctatcttcataggatataagctgcgtggaatccggggaagtattatcacagcattgggaacaattttgccgtctttcattattatattggctatcgccctgttctttcatagtttcaaagacaatccgatcgtggaacgcatctttaagggaatccgcccggcagtggtagcactcattgccgcaccgacttttactatggggcgatcggccaaaatcaaccgctataatctgtggattccggttgtttcggcattattaatctggctgttgggcttctcccctatctggattattattgcggccggtgtaggaggtttcctatgggggaaatttagaaaagttgagagttgagaatggagagttgagaaggcacggattaacgctgttgttttacagattcataattctaaaaaccgtgaaatccgtggaatccgtgcctaaaattattatataataaattattaatcacatgatttacctacagttattctatacatttttcaagatcgggctctttggcttcggtggcggttatgccatgctttctatgattcagggcgaggtcgtgactcgctacggatgggtaagttcgcaggagtttactgatattgtcgcaattagtcagatgacaccaggacctattggtattaatgcagctacttatgtagggtttacttctacggggagcgtttggggttccgtcattgcgacattcgcagtggtccttccctcttttatcttgatgctgaccatcagtaagttcttcctgaaataccagaaacaccccgtagtagaatctattttcaatggattacgcccggcagtagtcggattactcgcttccgccgcgttggtactaatgaatgtagaaaacttcggttcgcctactgaagacacttactcattcgttatcagtatcattatcttcctgattgctttcatcggaacaagaaaatataaagccaatccgatattaatgattatcgcctgtggtattgcagggttgctgctctattaataacgagcggctgaacagtaaacaaaaaaacgataaacaaaaaacggtgaacaaactgcgttatcattctgcagagtgtccaccgttttatcgttgtttattctatacctttacagtttcaacttcttacttacagatttcgattcattatgtaaacggtctaaggcagtcactacataacggtattttgtttttcctgtttcataaggaagtttgtagaacggattgcgggtgatagctacaatatgtgaaggatcgtccaaatccaccttctctttgctgccaaagcgatagactacatatcgaacagccttatccatctccgtatcggctttcggagcagtccagaaaaggatataaccatcttccgtccatacctttttcattttacgcaccttgtccggagctttatcatccataaaatcaaagactggaaccaaagccggatacttatgatattcactgattaaagcatcacgatatctaccctgattctcaacaacggctgccgcataccattgacaactacctccaattgtctggtaagcacgttgcaaagccatcttgcggggaagctgattgatagaaggattctgcggatcggcaaactgaacagtcttcggcacggactgaccgataaacaacggccggttttccgaatgagtagcccaccatttcaccaatgtctcatagtcagccgctttatgaccgatttcccagtaaacctgcggaatattataatcaatccatccttcacgtgcccaaagcagtacatcagcataaagatcatcatagttttgcaagccattggtgttacttcccaacggatcactcttctgattacgatagataccaaacgggcttataccgaacttcacccatggcttgatgccacgaatcgtctcgtgaagtttctttatcaacacattcacattactacgacgccaatctgccttgttcgtgaaacctccaccataacgggcgaagcttgcattatccgggaaatctaatccattaaccggataaggatagaaataatcatccatgtggatagcgtccacgtcataacgggacacaatgtcggtcacaattttgcagatatactcccgactttcaggaagtgccgggtcgaagtatagctgatcgccataagtaacaaaccattccggatgctggtgataaatatgttccggtgccaacttattctttaatgaagtcttcacacggtaaggattgatccaggcatgaaactccatattacgtttctgacattcttcaatcataaactgcatcgggtcccacataggagaaggcgtctgcccttgcgttcctgtcaggaaacggctccacggttcatattgggaagcgtataatgcatccgcttcagggcgcacctgaaagatgatcgcattaattccggcttcctgaagagaattcaactggctaatcaatatttgcttcagtcgctctgtaggaatgccacgaaactggccattgacagcctgtatccatgctccacggaattcacgtttaggatatttattgcctgatggcacctgtgccctcactcctaccaccagaagaagagctaaaagtaaaagatagtttttcagcttcataatattcttaaatcgtaataatgtgacgcaaagataatacaaactcccgataaattcgctaactttgccgactaccataaaaaaggagtattttatgtcagaaaacaactatatttcgatcaaaggcgcacgagtcaacaacctaaaaaacatcgatgtagatattccccgcaacaaacttgttgttatcaccggattgtcgggttcgggaaaatcatcacttgcttttgataccctttatgcagagggacaacgccgctacgtagaaagcttaagcagctacgcgcgtcagttcctggggagaatgagcaaaccggagtgtgactttatcaaaggaattcctcccgccattgccatcgaacaaaaagtaaacagccgtaatccccgttccaccgtgggcacctcgactgaaatttacgaatatctacgcctgttatattcacgggtgggaaaaacgtatagtcccatcagcgggcaggaagtgaagaagcactccacagaggacatcgtcaactgtatgctttcctatccggaaggcacaagatatacggtactgacgcctatccgcctgcgtgaagaccgcacattacaacagcaattggagatagacctgaaacaaggattcaaccgtatcgaagtgaacggtgaaatgaaacgaatcgatgaatatacgcctgtggcaggtgatgaagtctatctgctggtcgaccgtatggcggttgccaccagcaaagacgccatcagccgactgacagattctgccgaaacagccatgtatgaaggcgacggaacctgtatgctgcgtttttttctatcggatggaactacgaaacttcatactttcagcactaaattcgaagcggacggcatcatctttgaagaaccgaacgaccagatgttttcattcaactcgcctatcggcgcttgtccggcgtgcgaaggattcggcaaagtaatcggcattgacgagcacttagtcgttccggatcgttcattatcggtatatgaaggagctatcgtatgctggcgtggcgaaaagatgggtgaatggaaagaagaattaattcataatgcggagaaattcgacttccccattttcactccttattatgagttgacagacgcgcaacgcaggttactttgggaaggcaaccaatatttccacggcatcaatgattttttcaagatgctggaagaaaatcaatataagatacaataccgggtgatgctggcgcgttaccggggaaagacgctttgcccgaaatgccacggcacccgcctgaaaccggaagccggatatgtacgggtgggcggaaagaatatttccgaactggtggatttgcccatcacagaactgaagcaattcttcgaccatctggaactggatgagcacgacagcaatgtgtcccgacgtattctgattgaaataaatagccggattcgctttttaatcgatgtaggtttgggctatctgacgttgaaccgacttagtaattccttatcgggtggagaaagccagcgtatcaatctggcaacctcgctgggaagtagccttgtgggcagtctttatattctcgacgagccaagcatcggactgcatagccgtgatacagaccgcctgctccatgtgttgcgtcaactgcaacaattaggaaatacggtagtagtggtagagcacgatgaagagattatccgtgcagcggattacattatcgacataggtcccaatgccggacgtctgggtggagaagttgtttaccagggagatatgaaggatttaaagaagggaagcaacagctatacggtacgttatcttttaggagaagatgaaatacctgttccggagcatcgccgcccgtggaataattatatagaattgaaaggcgcacgtgagaataatctgaaaggagtaaacgtacgtatccctctcaatgtaatgacagttgttacgggtgtttccggttccgggaaaagtacattggtgagagatattttcttccgggcattgaaacgtgaattagacgaatgtagtgaccgaccgggagaattctcttcaatcggaggaagtttgcgtgacctgcggaatgtagaatttgtagaccagaacccgattggcaaatcatcacgctcaaatccggtgacttacatcaaggcttacgacgaaatccgcaaactatggtccgaacagcctttggcgaaacaaatgggatatacccccggattcttcagtttcaacagtgaaggcggacgttgcgaagaatgtaagggggaaggaaccatcaccgtagaaatgcaatttatggcagacttagtgttggagtgtgaatcttgtcacggaaaacggttcaagtctgatacgctggaagtgaaattcaacgataaaagtatctacgatgtgttagagatgaccgttaatcaggcggttgagttctttaacgaacatggacaaaagaaaattgtgaagaagttacttcctttgcaggacgtaggactgggatatataaaattaggacagtcgtcttccactctttccggtggtgaaaaccaacgtgtcaaactagcattctatttgagccaggagaaagccgacccgacgatgtttatctttgacgagccgactaccggacttcatttccatgatattcgcaaacttctggatgctttcgacgcactgattcgccggggacacagtatcgttatcattgaacataatatggatgtcatcaaatgtgccgattatgtaatcgatctcggaccggaaggtggagataagggtggaaacattgtagcagtgggcactccggaagaagttgccgcctgcggagcaagttatacaggacaattcttaaaagaaaaactccgctaataaatgataattttagggttcaccacagaggccacggaggacacagagttcttctctcttttttccgtaagtaaaacagagcgataaatacgatgataaatacgtgagactctgtgttattctatagtgaataaaaaatagtaaacctctgtgtcctccgtgtcctctgtggtgaaatataaattcctatttacagctaattaaaagtagaatccgaatcctatcttcacaccgaaacgtgaattatcagaatcatcaaaacgccatttataataaactgccggttcgatcgttacagttttggagagaaagtacgcatatccggcttcaatgcccaatccccaatcgttgttatggctaccacccttgtaacggacccgttcccagtcaaaaccacccccaagataaatccccgttgtattgaaataacaacgcattcctgtacctagtgtatatgtatccttcggttgcgaccagtctgctccaatatttaccatcaatgcaaaaccatctgccaaaaatgtaccggcttgcgcaccaataccaaacttggcatcatcatttttactgtaagaaaaatccagtcctgtcacagaagggttgagaatcatcgttcctttctcaaattgtgcctgcgcagtaaaagagactgctaataagcaaagaaccaaagctaatttcttcataaacttatttttttaagtgaataaattgttcgtcttttttgcggcgttcacgcatttgttccttttttcgaagcaccagccaaagaaggaggacgatgacataagaaaccaccaccgtaattattttttctgtcaggctgacttccgtattacgaggcaacaaataagccgctgttacggatacataaataaggaatgcaagcgcaactcctgtcgattttcttattttcttcattctgataattttcttgttttttgcttgcttatccagatatagaaccaaactgccgcaactactacacacgctataccaacgccataggaagctgcatgcgaaagccccaatccttcaggagcaatacatatataagtagaacatacacatgtcataaacagtgccggtatcaaagtgatgatataagttttcttagataccgccagaaaaaccgttatagcccacaaggtaaacacagccagcgtctgattcgcccaggcaaaataacgccatatcatattaaatccgtttgcgtcacgcaagctatacaaaagcagaccgatagcaaggacaaacatcggaatgcaaatatataaacgacggcgcatacttttttgttccatacccaggaagtctgccacaatcagacgtgccgaacgaaaagccgtatcacccgaagtaatcggagcggcaatcactcccaaaatggcaagtacgcctccgacagctcccagccactccttcgttatagaatctacaataacggaagcattgctttcttccattccgttttcatggaaaaagtaagtagcggcagcagcccaaataagagcaacaatgccctcggtaatcattgcaccgtaaaacaccggacgtccatgccgttccgaggtcatacaacgtgccatcaacgggctttgcgtagcatgaaaacccgaaatggcaccacatgcaatactcacaaacataatcggaaaaataggaagctcacttgcttcgggatttgtattttgcaaaccatcccaaagttcaggcaaagccggatggttaacgtagagcatcaccaaaatgcctactgccataaacaacaaggcaaccgcaaatataggatatattttacctattattttatcaacaggaagtagggtcgccaaaatataatagaggaatacaaccacaatccaaaacgtagcatccaaactttccggagtgagttttgccaacagtccggcaggccccgcaacgaaaaccgcccccaccagaatcattaaaatgacagtgaatcctctcatcacctgcttggtagtcagtcccaaataacgtcctattatttccggcagactttcacctccattacgcaaagaaagcattccggcaaaataatcatgcactgcacccgcaaaaatacttcccaacacaatccacaagtatgaagagctaccaaatttcgctcccatgattgctccgaaaataggacctaatccggcaatattaagaaattgaatcatgaaaatcttccaagtgggcaatggaatatagtccactccatcagcctttgtaagagccggtgttttacggtcatcaggaccaaagacacgttccatcaggcgtccgtacgtaaaatagcctactaccagtgccagcaggcatagagtaaatgtaatcatagcgtgtcgttttttagcttggcaaatgtaacataatctcacgaaacagcccaacaataccgacacttttactaactttgcagggatttaaaacaaaaaataaagaatatgcgtcgatatattttcattctttcacttttgtttcctttcctctcaatggttgcgcaacccaaacatgaagttcgtgccgcatgggtcacagcggtgtacggactggattggcctcgtacacgtgcaacaactccccaaacaattcgcaaacagaaagaagagttaatagatattcttgataagttgaaggctgccaacttcaacactgtcctatttcaaacccgtacacgtggagatgtattatatccttcagcaatcgaaccattcaattcaatcttaactggaaagacaggaggaaaccccggctatgatccactggctttcgccgttgaggaatgtcataaacggggaatggaatgtcacgcctggatggtaactattccgctggggaataagaaacatgttgcttcgctcggaagtcagtccgtcaccaagcggatgaaagatatctgtgtcccttacaaaagtgaatatttcctcaacccagggcatccggctacgaaagagtatttgatgaaactggtacgggaagtcgtaagcggttatgatgtggacggagtacattttgactatctgcgttatccggagaatgctccccttttccccgataaatatgatttccgccgatataataaaggacgtacgctggatcagtggcgccgggataatatctccgagattgtacgttatatatataaaggtgtaaaagcgatgaagccttgggtaaaggtaagtacctgtccggtaggaaaataccgggatacatcacgttatccttcccgtggatggaatgctttctttaccgtttatcaggacccacaaggctggatgggagaagggattatggaccagatttatccgatgatgtatttccagggaaacaatttctatccttttgctctcgactggcaggaacaaagtaacggacgacaggtggttccgggacttggcatttattttcttcatcctgatgagggtaaatggacacgtgacgaaattgatcgtcagatgaacttcatccgcagtcagaaaatggcaggtgaaggacattaccgggtgaaatatcttatggaaaatacacaaggtatctacgatgaattggctgagaatttctatgcatatccagctttacagcctcctatgccttggctggacaatgttccgcctacggctccgtccgaactaaaggttactgatatcaacaatggatatacggaattaaagtggcaggctgctaccgacaatgattcgcgtaataatccgatgtatgtcatttatgcatcaaatgaatttccagtagatactaatcgcccggagaacattgttgcacaaggcgttcgggagacaagttatatctatgctcctatcctaccctggaatgctaagaaacatttcgcagttacggctattgaccgttgcggaaacgaaagtgcggcggtacagaagtaaaataaacatgcctatactggtatgaacttcccagcaaaataatctagttctacttcattccagttttccggaatggaatgattaacaataacaagtaaggcgaacgatagtcacatggcatgtgattacttgtttcatgcaatgaaactttttgtttctcggtgtggaaccaatggtttcactgcatgaaactatcagtttcacaccgagaaaccataacttcgatataatatcacaaaaacacgctttttgagataaacacccacgcccgataactactctttttatgagccggcaccaatgacaaatagcctgattttattcttccttgttctatttccaaaggataagcctcctccatttctttgtgtgctctccaggctgttccttccgtagggtaatagcttatttgaaaagctcctgttgaagtaggatagatataatggtcataaatatgacgcgctactactcccatattcatcctcaagttgatttccacgcaaggatgaatccgataaacaggagattctggaaagcgacagatcatcatatccactcccaaataaccattataaatggttccgaaacggagggataattcttgttcaaggcggtcgcgcaatttataaatttcttcgacagggatatattccgaaagattccgttcgatggctgcatctgaaatcagcagattaccttcgtacgccccacttccacccgtacggaattgagagtatccggcaaagccaaatcgaccattacccgaagaacgaaattccatagcaaaatcttccaccttattatatagaggttcgccaataacacctccttgctggttgccaatgcgtgagcaccaaccggaaatggaaggagtatatacacctttgcaccaattcaacccttttccgctaccggataaaggagctttcagtaaacaagtatcatgtgattctacaaatgacttccattcttcgggaaacgtcaggtaaaaagactctccacaaaaacaggctcccagttgtagctgtggtaataatcccacagcgcaggaacgatgggaacagaaacgcagtttatccaattgctcaatagaaggaagctcgctttcttccactcccaaatccaacagtcgttttcttattgctatatcccagccccaaggacgaatatccaaattccgctccgaagcaagttcaggttctgtcatcaaatcaaccgaaagtcctaataattcctgtatcttcttcacatagtcgagattataagcggaaggagccaatacaacacttccctcttctgcataccacatcggcaacaaagccaattcggatgccatctgccgggcggaagccggtgccatatagtttgtttcaccgctggctaacgccaaatcatgttccggattgaatatataaagagccttttttgtcattttaaacgaattcaatacattattctgcaaatatatacaggaaatagccaggaatggctacaataaacagaaagttctaattaaactcacaattttgccatctctactttgcaaatcctaaaaaaagcagtatatttgccacccgaaaaacaaagaactgaaatggaatcattctatcgcacacacgcctacctcgttgagcacaccaatgcccccgttcgccgcgatcttatggacgagatcgattggagcgaccgcctgattggtatcaaagggacacgtggcgtaggaaaaaccactttccttctccaatacgccaaagagaaattcggaaacgaccgttcctgtctgttcatcaacatgaacaatttctatttctcgggacacagcattgtagactttgcctacgaattccagaaacgtggcggaaaagtattgttgattgaccaagtgttcaaacatccggaatggagcagagagttgcgcatgtgttacgatcgttttcctaatctgaagattgtctttaccggctcatccgtgatgcgactgaaagaggaaaaccttgaactgcgtgatattgcaaagagctataacctgcgcggattttcttttcgcgaatacctgaacttacagacaggcatgaaattcagggcatacagcctcgaagaaattcttagcactcacgaacagattgccaaaggagtactctctaaagttcgtccgctggattacttccaggattacctgcatcatgggttctatccgttcttcctcgagaagcgtaacttctcggagaatttgctgaaaacgatgaacatgatggtggaagtagatatcctgctcatcaaacaaattgaactgaaatatctttcaaagataaaaaaattactatatttgctcgctgtcgacggaccgaaggctcccaatgtgagccaactggcaagcgacatacagacatctcgcgccacggtgatgaactatatcaagtatctggcagatgcacgactgattaatctggtttatccgaagggggaagaattccctaaaaaaccttcgaagataatgatgcacaactccaacctgatgtattccatctacccggtgaaagtggaggagcaggatgtgctcgacactttctttgtgaattctttatggaaagaccataaggtacataaaggagataaaaacgtctcttttatggtggacgaagtaatgccgttcaaaatttgccaggaaggagcaaagatcaagaacaatccgaatgtgacgtacgcgttacataaggctgaaataggtcggggcaaccagatacctctctggatgttcggctttttatattaaaagatttatttacttaaatatttaatttagttatgactaaacagaagaaattcatcacttgtgatggtaaccaggctgcagcgcatatctcgtatatgttttctgaagtagctgctatctaccccatcactccttcttcgactatggctgagtacgtagacgaatgggctgccgcaggacgtaagaacatcttcggcgaaacagtattggtacaggaaatgcaatctgaaggtggtgctgccggtgcagttcacggttctcttcaggctggtgcgttgactactacttacactgcttctcaggggcttctcctgatgatccctaatatgtacaaaattgccggtgagttcttgccttgcgtattccatgtgtctgctcgtacattggcttctcacgcattgtgtatcttcggtgaccaccaagacgtaatgtcagctcgtcagactggctttgctatgttggctgaaggctctgtacaggaagttatggatttggctggtgttgcccacttggctaccatcaaatctcgcgttccgttcatgaacttcttcgatggtttccgtacatctcacgaaatccagaagattgaaatgttggaaaatgatgatcttgctccgctgatcgatcaggaagctttggctgaattccgtgcccgcgcactgaatccgatgaatccggttgctcgtggtatggctgaaaaccccgaccacttcttccaacatcgtgaatcatgtaacaactactatgaagcagttcctgctatcgtagaagaatacatgaatgaaatttctaagattacaggtcgtaaatacggtttgttcgattattatggtgcagaagatgcagaacgcgtaattatcgctatgggttctgtaacagaagctgcccgcgaagctatcgaccacttggtagcaaatggcgaaaaagtgggtatggttgccgtacacctgtatcgtccgttctctgctaaacacttcctggctgctgtacctaagactgccaagactatcgcagttcttgaccgtactaaagaaccaggcgctaacggcgaacctctttaccttgacgttaaagactgcttctacggcgcagaaaatgctccggttatcgttggcggtcgctacggtttgggttcaaaagatactactcctgctcaaattctttcagtattcgagaacttggccatgccaatgccgaagaatcacttcactatcggtatcgtagacgacgttactttcacttctcttcctcaaaaagaagaaatcgctttaggcggtgaaggaatgttcgaagctaaattctacggtttgggtgctgacggtacagtaggtgctaacaagaactctgtaaagattatcggtgacaacactgacaaacactgccaggcttacttctcttatgactctaagaagtcaggtggtttcacttgttctcacttgcgtttcggtgatactccgatccgttccacttatttggtaaatactccgaacttcgttgcttgtcacgttcaggcttacctgcacatgtacgatgtaactcgtggtttgcgtaagaacggttctttcttgctgaacactatctgggaaggtgaagaactggctaagaacctgcctaacaaggttaagaaatattttgcacagaacaacatttccgtatactatatcaacgcaacacagattgcattggaaattggtttgggtaatcgtaccaacactatccttcaatctgcattcttccgtatcacaggtgttattcctgtagaccaggctgttgaacagatgaagaaattcatcgttaagtcttacggtaagaagggtgaagacgttgttaacaagaactatgctgccgttgaccgtggtggtgaatacaagactttagctgttgatcctgcttgggctaacctgccggatgatgcaaaagctgaaaacaacgatcctgcattcatcaacgaagtagttcgtccgatcaatgcacaagatggtgacttgctgcctgtatctgcattcaagggtatcgaagacggtacttggtatcaaggtacttctaaatacgaaaaacgtggtgtagccgcattcgttcctgaatggaatccagaaaactgtatccagtgtaacaagtgtgcatacgtttgtcctcacgcttctatccgtccgttcgtactcgatgctgaagagcagaagggtgctaagttcgaacaattgaaagcagtaggtaaagtattcgacggtatgacattccgtatccaggttgacgttctcgactgtctgggttgcggtaactgtgctgacatctgtccgggtaatccgaagaagggtggcaaagcattgacaatgaaacacctcgaaagccaattggctgaagctgacaactggacttactgtgctgaaaacgtgaagactaaacaacatcttgttgatatcaagtctaacgtgaagaactcacagttcgctactccgttgtttgagttctctggtgcttgctctggttgtggtgaaactccgtatgtgaaattgatttctcaattgttcggtgaccgtgaaatggttgctaacgctaccggatgttcttctatctactctggttcagttccttctactccgtatactacgaacgaaaacggtcacggtcctgcttgggctaactcactgttcgaagacttctgtgaattcggtttgggtatggaattggctaatgaaaagatgcgtgctcgtatcgtgaagttattcaacgaaatccttgctgccgacaacgcttcacctgaagcaaaagaagtgctgaaagcatggattgaaaacatgtacgatgctgacaagactaaagaattggctcctcaagtgaaagcagtgattgaagaaggtctttctcacggatgtcctatttgcaaagaactgaaaggactgactcaatatcttgtaaaacgcagccagtggatcattggtggtgacggtgcttcttacgatatcggttatggtggtcttgaccatgtaatcgcttccggtaaggacgttaacatcctcgttctggatactgaagtttactctaacacaggtggtcagtcttctaaggctactccggtaggtgctatcgctaagttcgctgctgctggtaagcgcgtacgtaagaaagacctcggtctgatggctactacttacggttatgtatatgttgcacagatcgctatgggtgctgaccaagctcaaactctgaaagctatccgtgaagctgaagcatatccaggaccatctttgattatcgcttacgctccatgtatcaaccacggtctgaaagcaggtatgggtaagagccaggaagaagaagaaaaggctgttaagtgcggttactggcacttgtggcgttacaacccggctctggaagaagaaggcaagaatccattccaattggatagcaaagaaccgaactgggaagatttccaaggtttcttgaaaggtgaagttcgttacgcttctgtaatgaaacaatatcctgctgaagctgaagaactattcaaagctgccgaagaaaacgctaaatggcgttacaacagctacaaacgtttggctagagaaaactggggtgctgaataatagtaataccctataaataaaaaacggtaatcttgtagaagattaccgttttttattgtatgaactctgtccaacataaacagtactccctttttcccactagagttcatgtctattttatatttaaaattaagaataacaatgctccaatctatttattctctgacttcggaatccaactatccaccaacagccgatgctcatccctccatttacgggctatttcttcttcatccatcttggcatccttcatagctgtcataaaagagctaagttcttctgtcgttagtttgatgttgccaaagaattcggcagcaaacggatctttctcactgaatcctttccatgcaatagcatgtatttcttccaagtctccatatactttcttcggatcatccaagaatttcaagtcaaactggtcgaacatccaatgcggtgtccaccccgtaatgacaatccattctcctttgtccatcgcttttttcaaagaagccagcatggtggaactacttgaagtcatgagggtatacccatcaagtccgtaagcagcaatggccttatcggtcgtcttcattatccctgctcccgcatcaattcctactatttcagaagaaaaacggtctttattagcttccagctcattaatagagtggatcgtaacatattgaggaacaaccagtccgacgcgagcttctccgtatacctccccaaaaaattcgatgctgtctccatactgatccatataatctttcatcgttattggtaaccaggcatccagaaacacatcagatttctttcctgacatagatacaaagatgggggcaaggtcagcattttgcagttcaacctcatatccatgctcttccaataccaccttagccaaatgactcatggcaataccttccagccaattggcataggctatttttactttctttttctctaagtctgaattagtacaggaagctagcaaaagcatagctgacaatactattcctactattttatatattctcatacgtattttatcctttccgtttagttcttattttttcgtcctgccattccttgcgtgatacggtctaagatgatagctaaaataacaactgctataccaccttcaaacccaagtccgattttcatttgggtaatacctttcaatacaatttctcccagaccaccggcagcaatcatggcagcaatgacaaccatagaaagcgacatcattattgtctggttgacaccagtcagaatggtgggcaacgccaaaggaagctgcactttatacaataactgccaacgggtagctccgaacgaacgggaagcttccactacatttttaggaacttgccggattcccaatccggtaaggcggaccacaggaggcatagcaaagataatggtggcaaacactcctggcactgctcccaatccgaaaaacaaaacagcaggaatcagataaacaaaagcaggcatcgtctgcatcaagtcgagaacaggacgaagtattttctctgcacgcggactgtttgccgtccacactcctaaaggtacaccaacaatcagagccagacaggtagatgaaaaaacgagagccagggtttgcatagtagcctcccaaaatcccattccatagatcagtaataatcccaatgcggtgaaaattgccgtaccgcgtcctgctttcatccatgcgagtgcagcaagtaccaaaatggttatataaaaaggtattccgaaaagtatgtgttggaatcctataataaaactaccgatgcccgcattcacggcatcaaagaaagtggaaaaatgtaccatcatccaattgatggccatctctatatattgtcctatatttatcataaatctattgcgttttgaattatttcgtttatttcttctttatctttcccggtcacttcgatgattaaggatgaaagcgggattgttcctaaaaactcgcgcgtctcatcaatcacccataccggtgaattgctctttgtcattagaggaagtatatcctccaacaccgtatcctccaacacagaatgtacttctgtacgcacaatcgtttcaatggatttttcctgtttgctacgtaacttaagcaagtcgttcagacgtacttctccgaccagtttatcatcggtgtctatgacaggtaatacggtgatattcttcgcacgcatcttacgaatcaatacttcgggaccttctttcttcagacgggccaccaacggtttgtcaatcattaaagaagaggcggtaataattttgctcctatccacgttttcaacaaaacgggctacataatcgttagccggttcagtcaggatttcctccgaagtacctacctgcaccacttctccgtctttcatgatggcaatacggtcacctagcttaattgcttcactcaagtcgtgggtaataaaaacaatcgtctttttcatctttgattgcaaggccagtagttcatcctgcatctgtacgcgaatcagaggatcgagagcagagaaagcctcatccattaaaagcacttcaggattattagccagagcgcgagccagtccgacacgctgttgcattccaccggaaagctcgcctaccatctgattttcatatcctttcaatccgacaagcttcatgctttccattgctttcttctcacgttcctctttcttcactccctgaagttcgaggccgaacgcgatattgctcaatacggaacggtgaggtaacagaccgaaattctggaaaaccatcgccagctctttccgacgaacctgcaataattctttttcggaaattttagatatatctactccgtttacaagcacttgcccggtagtaggacgtatcagacgattgatacaacgcagtaatgtcgattttccacttcccgagagtcccattatcacgaaaaactctccttcattaattgaaagattggcatctttcactcctaccgtacaaccggtatctttcagaatttcctctttactcttatcttttttcaacatcttgagggctttctgcttctcgttaccaaagataaggtacaaatcctttatttctattttactcatataatatattggtttagattataatatttgttttgttttcaactgccgcattccttattctcacttacgataaacaagttgaatgttcgcatggttcagtcatgtcacatgataacatgacggtccgacgttttttaaatggtttaaaaaaacagacagagtagtttaaaaggaatagaatttgataagattatcctcttaatgaacagtagaaaacagtattttcataaataaataacagtctgttcttgcatattgttggcacaaaggtaaggaaaatagattaaatatgcaaatttcattcaggtacggagtaattccaaagatgctttttcaagtctacgcatccattttgtttgaaagagatcccttcttccaacaagagttgtttctgctctgtccaacccggaacaagccgtcccgacgcattgacaacccgatgacaaggcgcagataaatcatccggaatctgtttcaaagcacgccccaccatacgggaacattgagacattcccaataatgcggcaattcccccataggtagaaactttacctaccggaatttctcggacaacctgatacacctcttgacaaaaggatgcggaaaggctcgccttatctactttataatctttcatcactcaaacattactttatttcagttccaaaactagataaaaagaaaagaatttgcaaataataaaagcatttcaaataaaatatgcaactttatttgctttatttacaaataatcccgacctttgtacccattaaaagcaaccctattattaacaaaacaagcactgctgttatgaaaaagaaaactatcctgttcgcttcttgtttattgggagcactggctttcagctcctgtgagaagaacctttatgatgaaagtaaacaacccgagaaagaaaagaaaatgactgacttggaagtacctgccgatttcgactggaaaggttctcaaaatgccaaagtgaaaattgccagtcaatcaactgctactatttctgtatttctagaagaaaattgcaatgaagaggctttgatgcttcgaatggatgtcgatgccaacacatcaaaattggaactcccaattgaaattcctgcatatataaaaaatgtgtatgtaaaatatggtaatggctctgaaatacaaactgttcctgttgaaagtaatggtactatttctatagtagtacctgctaacgctacggcattatccagagttaccacaagagctaataaagaagttgaaacgaacaacatcttcaattatccgggatatggcaacggaactattatgttcgaagatatgtatccagctttaggcgattatgattttaatgattttgttgcatggtataatttccaaattgacggtttttattggagtcacaatcaatgttatgcagaatacttaatgataggattccaaatcagagctataggaggtatatatgactacaatccttatatccgcttggcagaagtacaatataatgaacttgatttagaagaaactcaaatgtatcttgagcgtaacaatcctgaagaggctgaaaatatcaaaatcctaaaaggcccaaaaggggaattgattatttcactaaagaaaccggccattcctaacggatacaagtattataatacggaggtaaatgaaaaaacaaagcctaaaaaaatgatggccatttacttggtgttcaactcacctgttaacgttaaaagcctacaagacagtaaaatggacttttatattgcaaaaactaataaaggacaagaaatccacttaaaaggttatagcccggtttattataacagcaacgaaagttatgtaaatgaagacaactttatatggggattaaaagtacctgcatctttacatcatgccagagaagaagtaaacttcttggaagcatatccagactttgaacaatgggtaacatcgggaggtcaagagaaccaaagatggtggaataagccaaaaacgaataagttgattatgaattaataaatatacagtaaatcatatactgaattaaataagaggtaaggtatgtcaatagatttccttacctcttatttttatcatatgaattccatagaagtataaacagataaatgctcaccaccaaattttgcagattctatcctatcctttcctcttcaacaaatctgtcggactctctccaaactgttctctataacatttagtaaaataagaaggagaactaaaaccaacttcataacctatctctgccactgtcatatccgacgaagcaagcagggaagcagctttcttcaaacgagctatacgaagcagttcattcggggaataattagttagggatttgattttgcgatagagttgcacacggcttaatcccatatctttacccaagtcttccacattcaaatttgaatctcccatctttgcctcaatcaaagctttgaatttttccacaaagtctttatccatatcacagacatcctctttcgccaacgtttgtccgtcaccaaaaaactgtttcaggcggcggtgtgaatctatcagattacgaacgcgtgccaatagtaattgcgaactgaaaggcttggagatataagaatctgcaccaccatcatacccttgaattcgttgttcatccaaagaacaagctgtcaataggataacaggaatatgacaggtttgtaattcgcttttcaagcgacgacaacattcaattccatccattccgggcatcattacatcggagataatcaagtccgggacatatttcatagctttacgaataccttccgagccgtctgcagcttctataacagtataatcagtatgaagcaatccatgcacatataagcgaatatcagcgttatcatcaataatcagaacgcaaggtttggaagagtcgtaacttttttccaattcctcttcttcgtaagttaaagcatcattcaagctcgaagaaccggaataaccggaagttgcaggagttgccggaaccccagcaacggcagaggttgtagcatcggtggaggttacagaagtagcagacacagagaatgccggagagttttcagaaacaacagtctcgcaagtctgcacaggcaaatcaacggtaaagatagttccttgcttttcatcactttccaccgtgatggtacctttatgcaattccacaaaagcctttaccaatgccagtccaatacccgaaccggcatggtgcatatctatcttatagaaacggtcgaaaatattccggatatgctccgcagaaatcattgaaccggtattggcaacggtaaagcgaatccagcaatgatcgtctttagtcagggaagacaagcgtacagttacttttccgttttccggagtaaatttgaaagcgttggaaaggaggttgaaatagatgcgttccaacttttctacatctgccaatgtgcggtaatccgtatccggcatataatcgaatgagaaatgaatatgcttcttccgggctactgccatgaaagattcgttccatccttcaaaagaagaaagaatgtctaacgaaataggagtatattccatttttccattctcgtatttacgaaaatccagaatctgattgacaagacgcaaaaggatattcacgtttcgctgaactaacaataacattcggcgctgatcttcactcaaagacgaatcagccagtaaatgctctaccgggtcggcaactaatgtcagtggagtacgaaaatcgtgagatatatttgtgaagaaaaccagcttggcatgagtcgcttcttccagttgatgagaaagctggataagctgatcccgctgttcttcgagtttgtcacgctgttcttcaagaatatcccgttgctcttcgagtttatcgcgctgttgctctacttgtttcttctgttcggacaactctttattcaggcgattcttggaacggagggatttatagactaccaacaacaatcccgctactaataaaagaataaccaagccgccatacatcacgacctgctgcgtagctacacgcgacagatacccaccgatacgtccgttcaatgtttcaatcttctgatccagttccgagatatgggtagtctgaagttgcataacgtgcgcgttcgtgcggtctacaacggcagtattcatgaccgtttcgcgaggataagacttcttctcaagaatattcatggccagttgcatcactttgtccccattagtcggataaataaaagttgcatccagcacattgtcaagcaccaattcaagcccgtttcctttgccgggcagggcatcaatgccaacaaaaatcatttccttttcacgtccggctttcttcgcagcttgataggctcccggagcgatacggtcgttatgtgcatataccgcatcaatcttcggatgacggcgaagcatactatccatttccacttctgccggttcacgttcccaggcagcatccgctttatcaatcagtttgatatccggataattgctgatagcagccataaatccctgatggcgttccatggcaggggtggaaccacccagtccggtaagctccactacattccctttccctttcagacttgatgcgatataatttcctaccgcacgacctatttcataattatcggcaccgatataggcagtatatttatcagaaagtatcttccggtctacaagaatgacaggtattcctttctgataggcctcctccacaattggagtcatgggagccgcttcattggcggaaattatcagtaaatcaactcctttatctataaaataatgaacatcttccgcctgcttacggttatcatccgccgccgagcggatttcaaccgacactccatcataaaacatcgcttcgcgaagaatctcatcattcatcttgtgcctccaagagtcatcgctacattgggccaccccaatacggaaacgaggcgcatcctgccgacaggccgccaagcccaaaagacaaaacaagactgttatccacttcgtatatttcatcgcttcaatcattccctttctttcgtatatcttttgtatttctttctgtaatccaaatttctctccccgcattatttgcattcaccaccgggaaatacatcagttccactttcacagggttcagcgtatattttccagtaaagcgtggaagcaaaggaaccgtaaactgataagtacctaccggtaatttttcgctaaagataacagttttctctttaaaatactcacgatatacttcagaacgggagaaattaacaggttttgaggcataactacaacctgccggaacaggaacttcgagcatcacatattgcgcaccctcctgtttcacctgcaaggtaactgtcaatgtaacaggtacacccgccaccaaagagtctttttccaaagtcacctccaccttgaaagcatcactctgacgagcattcatcacacgcttcattgaatagacactatacaataaaggctcttttcccgtttttgaaataagcagactgtcgcctgctgtcagccgggcatgataaggaaattccgtaattcgttgatgatccttaccgctcacagacaccgacgttcctgacatccctccagaacctgccagcaaatcggtcagaacagttgccacagccgaagaagcctgatacgtattccatccgcgctccttagtccgcaaaatatacaattgcatattttctttcaacttacacagggaagggtcatttttaataatccggtaggctatcaatgtatttatcatctgatttccctcccaataataagtacgccgtccgtcgtcacagtaaacaccttccagcatatcctttttcagataaggacgtacgctatcacccacattcaccgaatccacctgttgcttgatttcccagagaagcagcttctctttcaagtatgaaagaggacgataatacttgtttctatttgccaacgagtcttctttctgttccaattgccggacgaaaggttccaataatctgactgccgaagaataatccgcctctactttccactcatgcagagcatgaagtatttctatatcttccagtttcattcctcgataaggacgcgtatgagcatactccactttcaaaccattcagattcaactccacaggataacctgcatcttgcgccatcttcaaagcccgcagaatatgcgcagacatccagaaagaagtattttcagagttcccccaccacgaccataactgatgtttgttctgatgattcgtcagtcgatggatgataggtcgaattgctttatctactttcaccttttcacccttactctgcatatactgttggtaagccaacaaaccgattaacttggatgccagctgctcattgcacaaatatttgtatcctgtcaagtaattcactgattctttatagatgtccaactgattgtcagtgatactcaccatcacttcttcatcctcgccggattgcactttaaccgtctttgcatcggacagaatacccaatgtgccctccgccaattcagttccctgtgccagtatcggaatcgtatattcctctccatcctgatagccatcgtcgcgagtgaaaagatagctgatggtcacgctatcggcatgaactgcctgcatcggcactgtttcatgaaatccctccatgaaactcacttcctgccgtttcaacgtatccgttccgacgcagaactgtgtctttccggctatgtgctgcccatccagataattgcggatagtcccgaccaccgtactctgatccccctccaccaagaagcggggagttttcaactccgccatcaacggtttgtaagagcggatggaacgtcggaaagtacccgtctgcaaacgacggttcatgccataaacgacagtttcccatttcgtcacattatcggggaaagttgtttcaaactgtaccgttccggttttatccgtaaacaaacgaggctgccagaaagccacatccgaaaaattcctacgtaagccattcaattgcatcagttcattatacaactgttcgttatccgcttcttcttttgctttctgatcttgctcttccagtttctccaaaggtgcggttgcagcagcagaagaagaagaacctaccattaatccggcaacagaccccgtcaacgaagttcttgaacgcatgccgtatcctacaacgaccacttcctccagcgcctgactatcttcttccaaagtaaccaacagattggctccgggagttgctctcatctcctgctgtttaaagccgacataactaaacaaaagctgatcccctcccctgtcacaatccatttcgaaatatccgtccatgtcggtgatcgttccctccgtcgttcctttcaccaccacgctgcacccgattaaaggctctccggtagcatccgtcacataaccggagactttaccgccgtaattgcgtacatactgcctgatcctcatttccctgtgaccaggaaagtttgtaccgatcctgccaattcctcttcccagcaagagccaccctgctgacaacgaatcgcgttcgtgtagaggcagagattccatatctacatccagataggtatatgattgtatcgtcagagcatcatgtttcagatactttccattgttataaagcaaaatcgcatcatacgttccggcaggaaacttggaatatattctattcatttgcaccaaagtatccggataaaccagttctccggtagtgcagtctttaaagagcaagttagccactccggtagaatctttttcttccggaagccggaaattcaacgtcttatccggcagggagaaataaatccgggtgggatgccaactctttcccttgcgaagttcggccaccagactacggaatctttccggtgataaatggtaatcattcaaagtcggaatctttgccacagacgaaaaattcagataagccgggcacagttcctcatccttatatttataaaccacattgccctcgaattcataagagaaacctccctcatgccgatacaacacaccattcatatatttccaaggtcccggctccacaggacctgccaatatctttttcttgtagcgcgacagctccatgagtgaaaccggaaacagctttccattatgttcgagcgaagtatataccgccccatccatcaccggaagacggcaaagataccgttcataacgcttcttctcttccgaagtaaacttatactcatcatatttccctttcctctgccgcaaccagactacttccactccttgcggcaactgattcatatcgaaacttaaaatcgttttcttgccccggtcgaaagccagagaatcaatgatgaaagccctgtcgtgcattcgcaacattatcttctgctttcccgacggatgcaatacaggaaaagaatactgcttaggctgttccgtccacgaaaaatagcagggaacatcgttctgctcaatcacatagatattcaccgcccgcccgttcagcatcacataaggagcaaactgggtggttccatccggtgtatcaaccgtctgacggaacagatttcccgaaggataagcaaactgataataaggcaacttatccaaatgaagcaactggttccaatgctgataatccaatgtgccggtatgtagatactctttttgcttcattgagtaggaagctcgttgctcgcgcggacggggtgcactcccgtaatagggtaaatcgggtacgtgataatccagctgcgtgttgaccgcaaaagctgtcagatcgacgttggataccggacgcccttgtatattggtcacgttcaattttgttttcactttctgaccgggatacactcgttccggcaaatcagattcaatcaccagccgttcggaaggtgaagtgtacgagcgtttcaacatacattccttatcccccatgaaataaaatacttctacgtaatagacggaagagggatcgatctctccggatttgtgttccatctcttttcccgaacctttctgcaacaggcggttgccttgatacacataccaggaaagttccagctgcaaaggattggaaagggagacacagaacgaatctttttctatgccgccattcagttccagtttggagtcaagtgcggcggaagcaatcgtcgtttcatatcctgtttccggtattttgaaacgatagtccgtcaccgcctgattgaacggttcgcgatagggcaaacgcactttcttcacttctttcttttcaccataggtcagttcggccgccacaggacgctccactcccaggtcgaagaatgaaaaacaaatagtatccgcctgcgtagtgcactgcatatcatagcacgaatagtagaaagtcgctttgctctgctgctccaaacggttattgtctgccgtaagcaaaactacattcaccgtatagaagcaatcggaagctccgaatatccgagcaggaatatctaccgaagctttcccggaagcatccagttccgcctgcacggacatcagtgtatcgggcaaagaaagtatctgcgcatacgacttcagtacctgctgtctgccgacagtcacttctacattcacctcccgcaaaggaagtccgttggcatccgttgcactgatatccatgcggttactctgcgatgcatattgcacattcgaagccagcttcaccaacaacttgtttccgttcagttcgtagtcttcatatttgaaattggtggaggctacgatgcgtccccgcttatcacgaagctgtacagtatatctctgatcgagcttcaggttcaatgaatccgccaacaggaattctccggcgaagcctcccggatggtaagggacgacggacattatcttcttatagtcacgccaggaagaaccgacacgcatccacaatgaaagttcctgtttcagaggacgtttatgttcggagagagcataagacttgaaacggacagtttcgcccggtctgtatttattcttgtcagtaatcaggtaactataaaactccggtgcatcttgccgcccataatcatttttataccagggtggtacaaggtgtttcctcaaatcgaataccgcacgaaacttatccacttcaaccgtcaggatatgctgttctttctgcgaccagttatcgtcagtatacgtctgactgtcttcatcgtaataaacagccttgctgcctacccgcactttggcatctttcctgatagtttccccggcatcaaccacctgcaaggtgagtacaccatactccttgaaaaggaaaacatgaaaaggaatcaccggagcataacggtaatgaacttcgttccgctctacatcagccagcagaaaatgccctttgaccggaggattgctccaagtatccgtgaaacgggcaaaaggagtctgctgtattttatcccattgtttctgtcggagtttgcctttgagaagtttcaaagcctctttgttagtcagttcgaaaacgatcgtttcgggagaggtatcatcccagatcatcggttgtccgaatgctccattggcaaaaagcaggactcccaataacaacaggctctttagctggcatagcattgtgttcatagtattcgatagattgattgagaacaaaaatagaaaataaaactgtgagtatgctataaatcactcgattattcgcaatcttatcccttgaaaaaaagtaaaaatggtcccccatatttacgcgggaaccattaacaaacgtataaagggtaatacaaacacttaattgatgttataaaacatctctttttatttggattatttgcaaagttgacagaagtccgtatctttgcaatgtgtttttcatagtattagatttaaggttaacaaaggttggagcaaggcgttgctcctttttttatgcctgtacgtttcgtacgtacaaaaaacaagaggtacaccccacgaaatgaaatatacctctatgcttactatcaataaaagaattacatcagtctatctttcaaaacctgcggaagttcgggcatcgcacctctctgtgtgcagacataagcagaaacctcaacagccagcttatgcgcttcgggcaccggttttccattgagaatggaggcacagaaagcagctgtaaaagaatcgcctgcgcccactgtgtcggcaaccggtactttgggcgtctcctggaaagagacaacgcccggtgtgaacacatagctgccattgatgccgcaagtgagaatcaacatcttcaggttgtattttgccaacagaatccagcatttatcctgcaaatcaatgccgggataaccaaacatacggctgatagtcaccagctcttcgtcgtttatcttcaggacgttgcaacggtggaacgattcgcgcagtacctctttagagtagaaatcctggcggagattgatatcaaatatcttgagctgtccgtctatatcgggcatcgtatccagaaagcgattgatagtggcacggctcacttcattacgttgagccagcgaaccgaagcaaacagcacgtgtgctcaaggccagacgtttcagctcatccgtaaagggaatgttgtcccacgccacgccctctttgatttcgtaacaaggcacgccctcgtcatcgagcgtcacctgcaccgtaccggtaggataatcgacctgttcaatctgcatcttcaacttcttctcgttgaatactttcagaatttcttctcccagttcatccctgcctacggcactcactacacgactgtcaaaaccaaactgtgatacatgataggcaaagtttgccggagcaccaccgattttctttccttcgggcaacacatcccaaagtgcttcgcccattcctacaattatattattcatgatatacgggttttattgtttccaaagttataaaattattttctgatacggaacgtataatacaagagataaagcacgcccaccgtcattacggcaatagcaccattctgtcccatggaagtatccgaagctactcccattgccaacggaaacaccgtcccgccgaaaagtcccataatcatcaagccggaaacttcgtttttcttacccggcaaatagagcaatgcctgcgagaagataacggaaaacacattggagttaccgaaaccaattaaggcaatgcaggcatagataattgccttttcatggaagataaacaaaccgatcatggcaatcaacatcagcaccacactaatgccgaagaaagatttcggagacatcttacgcaagatgaaagaacccagaaaacagcccgccgtacggaaaataaaataaagactagttgcaaaagcagcatcatccaatcccataccgatgcgctccatcagaatcttcggggcggtagtgttcgtacctacgtcaatgccgacatgacacatgataccaataaaacaaagcaggataaacggtttaccaagcagggcgatgcattgtccgaaagtagacggtttgccatcttctttctcctcttcaatctgtgtgacattgagcagaagaatagcgatgacggccacaatcatataaatagggaacaggatgcgccagcctaaatcgaaagtcggaatggcctgtgtcgctccccacatggcgatataaggtgccaggaaagaagcaatggctttcacaaactggccgaaagtcaggctactcgccaagcggtcgccacgcacgatattggaaagtaacggattcagagaagtctgcatcaacgcatttccaatgcccaggagggagaaggaaatcaacatcagcatatagctgtcgccgaaaacgggtagcaacagagaagcgaaagtcacaatcaaactaagcaatacggttttcttctgaccaatgcggctcatcagcatgccggtgggtacggagaaaatcaggaaccagaagaataccagtgacggaaagatattcgcctgtgagtccgacagcccaaggtctgcctttacgtaattggaggcaatgcctaccaggtcaacgaatcccatggcgaagaagcaaagcatcaccgggattagtttggagagggaagagtttttactgttttccattattttttcttttatatgatgaattctgtttccatagggcggaacacataaccctacggcaatgtatgcatcagtcctttatatagttggtgtatctcccgttccttgttactttaaagctacggtattgttgggttaccacggccgtgacgaactaacggaaccgtggctttgaagaaagtgtctccgcactttagtagaactcttccactaggacagacgtactcttccataaggaaagaagtattagtctatagggaaagaagtattctactccaaagaaacgaggaaagaacgcatagagtaaggagaataagcttatttcttcaacttgtagatcacaaacgaatctactttatacgctcctcctttactgtaaaagtcgatatgagtgtaaggttccgacgggaatacttgattagtcatcacaaaacgtccgccatcaccaaaggcttccacactggatttgtcaacaaacagacggagtttcaattcgtcttttccactttcaatggccgtccaggtcaacattgggaaattctcattgaagctgacctctccgctcttgcgacgatccatcgagaatttcttttctttcatgtcatactgcatatccacttcttcgcctttgtcattgtagagacggaagccgattacgtctgcacgttgattttcgattgtcaattctatttcgtatgcaccgtcattaccgggaatcatttctttaattgtgcgtgttccgtctactttgaacgagcgtttcttggaagcatcacgcaaagccagcagttcgggagagggagctgattggaggtaagtctcaccatctacggtaaacaggctcaagtcacggggaacggagttcgggctacggtattgggaggtaggaacatcgtttgcgtattgccagttgctcatccatgcgatagcgatgcggcggttgtcgggagcgtcactccaagtcacggtggcataatggtcttttccccagtccatccatttggttttggagggtgattcgtttacaaactcttttccgttgaaggagcctacaaaatattgagtggccgagtcaccgaaaggaccgtcgccgaggctgcaaagcagtacccatttcttttcatttgttccttctaccgggagttcgaataagtcgggacattcccaaacgtttccgtgtgcgccgtgtcctttgccgaagctgctttcaaatgtccagtctttcaagttgggggaagagaagaattgcatttcctgccctactgccaataccatgatccagcgtttggtgccttcgtaccagaatactttcgggtcgcggaagtcacgtgcttcagatactaatacaggattgttttcgtatttggtaaaggtacgtccgttgtcggtgctgtaagcaatgctttgcacctgacggtcgctgttttgtgtatagatggcgacgatggcgcctgcaccgaagccggcggtattatgatgatctatcacggcggagccactgaagatagtaccgaatgcatccggggcgattgctacggggcgatgttcccagtttacgaggtctttgctgatggcatgtccccagttcatatttccccatttggaaccgtaagggttgtattggtagaaaaggtggtattcgccgtctttgtataccattccgttcgggtcgttcatccatccgtaaaggggagagaaatgataagtgggacggaacttttcacgattgcttgtatcgaacgtgtcggacaatttcatttccttgcagcaagcggtgttgtccggcgaaaggttgacacgaaccaggtcgttggagttcattttaaatttgaaagaaattagtttgccggaatagtcggaaaggtctaccggaacaaagtaatcgactttatggatggccagacggacatcgaagttctttacctctttattattaacaatcaggctgatacgcacatcgggcgatgcatcttctacgggcaacaacagatacttctggttagtgttgacacgtacgaggcaatgtccttctcctaaatctttaattaatagaggagagttgtctgcacgggcggatagagagatattcatcacaatcatacaaaataaaaccgcgaaggtttgaatttgtttggaagagagtcttaaattcatgctttatggtattaaggttgttacagtgcaaagataggcgctccgggatgaaacgcctatcacttttgtttcaaacactgtaaaagatgttacttttctattaataggtgctcacttgaatatctgatacagtgatttcacctttataacaacagagtgaccacggattcttctgcatttgatagatgcggttcgtgaaagataactggtcgttgatgtaagtcacacaaatcgattggtcactgtaaatcgtcacacggtattcattatccgccggaatattgaatttgttatcaaacaagtatttggcattgtcaccgtctttctcgaagttggctttaccctcgtcagcgttgacgtggatgctataccatgatttggagtccgttccacggacgaaagagattccaaaacgatctgtattcgaggatgcttttacggtaaaggaaatcttgttgtgtactttcaaccggttgaagataacggaagctccttcggccaacgtataggttttaccgctttctgttacgtttccgtctttagccatcacttttacctcttgtgcggaagtgtatttacggtcgattgcatcgggaactcctagagtcaatgtaccgtcttcgtgctgaatgaggcgttgtgccaccaagttgccagcccattcgggttctacatcccctacgtttccattatcattaccggcacgggtaggacaccagccccagatgtaacggttggttccatcggaagcagtcttgcctgcatagaatgcacggctgtccagcataccttcccgattgtccggccatattccggcatcattggcggtggttgctttcagttcttcaagtgttttgcctttgaaatattgtaccttgcgcatgaaggaagcttgttccgaatagaccagataccaccagtctcccatcttgaatacgtccggacattcatagaaacggtcccacatcatggtcataaatatgccggcagacgcccactctttcaggtcagtagaggtgaattcggcaatgtgtccttttccgtttttacgggtggcaatcagcatgtgataaacgccgtcttcggtctggaacaggaacggatcgcggaagtcattcttgtcatagccgtacgtatctcctttcagatagaaagtgcggttcttggtccatgttttaaagtcgggagaggtagctaccatgactacctgtgcattctggtcggaagaaggtttgaatttattgccggtgtagaaggtgtagtagagtttatcaaccggattatagatggtacctcctgtaccgatggcagcatcctgttcgtcacgacctccacacggaatcagttcgccgagagattcataagtagcaccgtctttggtggccaccccgaaaatggggtggtaagtagcttcggggttcggacggtagtcttgcaggtacatcactttaaagtctttggcaaccggatcatagaatggcatcgggtcaccaacaaagcctacctgcggtttatagtacatcgagaagccatgctcgtcggtcgattggaagtaagtggctgtaccatcccagtctctttgagtcaatacgggatccatctcatcactgcaagcggtcattgaggccaacagcgtggtgattgctatatgtaagatcatatttttcataattattgcttattcttttatttacataagtagttgattgcattcagagtcatttgctctacgttgtagtggtagtagtcggcagaagcgtctacgcctttaccgtaccagtcgtaacaaccggagccgatacaaattgtgcgtccgctgttggcgcgcggctcaaattcggcaatgactaccgcaccgtcacctccacgtgccaggtcaattcctcctgtcaggttacgccattcgttcaagtcggcataacctccccagtctgttccgatatgccattgtgctgtactattggttatcgcatagccggcatcacaagtatatactgtcgatttgtcgccatctttccatcttaaatcctggaacaacggatgcgattcgctaccggtaatcgggaagctccacggagaagacgtaatttcaggtgagtcttcgtttcctccccaactgttgttgggtacacgctcgtcttttgcaatgctaaggtccttaatatagaaagttgcatagcgggtcagcaacaggttgccaccgttttgatagtagactttaaatttctctacggcagctttcgcatcatccggcaaaggaggattatcaccattgtctgcgtggaaatgccaccagattgcagtatatttacctaaatctacttttccgtctactacatctttgaatgagatgtattcggacatggatatattatccatcatccactgggcagcggctttttcttcaggacttgtcagttggctcacagaagaagctgtgccgataaaggcagtcggaattacatttccttgagtaactgttactacataaggagtcactgccgaacggtaagttgctgtataagtgacagggttggtaaagtcctgaatgctgccggatgccggagtcacagtgactccatctgatccggtgaatgtacctttcaactgggtaatatccactgtcagcggaacaactacagagattgtttttgataactggtctacttttcctacataagtatcattcaacttaaaggtcagtatctttgcttcgtctctcttcacggtaatcgtatagctcatctgtacgtcgccattcttcacggtcaaagatacgggaagagaaaagtcgattgtttcaccaacagcgatgctcgccgtagcaccttcggaaagattgatttcactgacggccattcgggtaacgtcataatcgtaaggaactcccactacgattgtcttattctgataatcgatcgtccctgcgtattcatccagtttaatagagttcacccatacatctccgtccagacgaagattggatttgaagtcatcgccacatcccgcaactgtcaggcatgttacagtcaccaacaggatggtatagagttgttttatgattgatttcattttattctttgttttaaaattgatgattaccaaccgaaattctgtgtataatttccgttactggcactgatctgttcgaatgggattggaaggtattcgttcttattttccgtgaaacctgcattcttgtaaatagaacaacgggctgcttcggtcacataataagcattgataacgtctttggcttctccccatcttacgaggtcaaagaaacgtgagctttccataccgaactctatacggcgttcccatttcagcattttcatggcttcgtcctgtgtatatgctttcagttcataaggagttactttgaagtttactccgtactcttctttgtaattgaaaatcagcatggtacttccggctgcacgactgcggacatcattgataagtgagatggcatcggcaatgcgtccgtcgttcaactgtatcagggcttcggcacgcatcagcaatacgtctgcataacggatgacgatatgattcagagaacttgcccaataagaaccttttttcaaacagtcacaatccgggtctacattctctttgagagaaacataatatccgtaaagtcccttgctacggctccagtcatcattcttctgaatcatgtagccttcgttgtatttataagggaagcccggcatacctaccgtgtggaataaacgggggtctacattgtctgacgtaacctcgtagttctcattatcgtaggtattgaacaacggttttccctgcgagtcggttttgaaagcattcaccagattttggctcggtttgtggaagtcacagcagcctagtatctgcggagttgtcagtcccattccccagttcaggttaccgttgtatgttccgtcgttgatagaatattgaatcgcccatacagactctacgccattttcatattgaggcaggaagttcatgctataatcattttccaatccgtaaccggctttggccatgatgagaggatcggtatatttcactacctgcttcaggtcttcttcgtcgataccggtaaggttgttgttcactccatcctgacggtaagccttatataggtaagtctttgccaggtaagcagcagccgcagcctgtgtaggacgtcctttttctatttgcacttccagcaggttgtcgtaggcaaactgaaagtcgtctgctatcttttgccattgttcgttattggtataggtggtattcgaaagcttgttgtaagcatccggttccatgttttcatcgtctactataacgatcttcttaaacagttgcttcaacatgaagtgagcatgtccgcgcaggaacctcatttcagcaatgcgctggttcttcaacggataagtcttttcatccatcagatcgagtgattgcaaggctgtgttggcacgggtgatgcattgatacagtcttttccatatatcgttgatgttccagtcggtagtgttgatacctttagaaatctccagcgcgttgaacacaccgccgtcttccgtaccggaaccgcccttataacaatcgtcggaacgcacgtcataattccaaagcgagaaggaagagttgatgtcgtcacctgttgcccaaatggcgtaggctgaaatcacgaggttgtccacgtattcgggagaagcgatctgatcgccggtcacaataccctgcggaacctgacgatccagaaaatcgttgcaactgcttgtcagcaaggtaaatccgatggttgctatgtatagtatctttttcatgatagttcgttttataaatgaagtgaattaaaatccgatgttaagtccgaaggtgatattcacagggatcggataagaaaagttcgggttttcggggtcttctcccgtaaagtctttactcttgatcgtcagcagattttgtgcgctgcaatagaaacgtaaacgttccattctcaacttcttggagattactgccggaactgtatagcctaattggatattacgcagtttcaggaaggaaccgttttcaacaaagtaagtggaaacacgctgttcattgtttgtatcgctgcgggtcaatgccggaatcgtagagttcggattagtaggcgaccaggcattgagcaggcgggttcccttgttcaggaagccgacgttggatgcactccagaagtcactcttcttcttcacgtcactgatgatatctactccttgaacaccttgccagaacatagtcaggtcgaagttcttatattccaggtagatattcaatccgtagctgaaagcaggagtcggatcgtaaatccattcctggtctttttcatcaatcacaccgttatggtcgatgtcgcggtagcggatacggcctacggctgcaccttcctgcgtagcgtgattgtccacttcttcttgtgatttgaagataccgtcggcaatgtagcccacttgtgagttgtatgtatgaccgactacactttttactccattaccaccaaactttccattggcagccactgtctccggcagttcaagaatttcattccggtaagtggagatgtttccgttcaggtcgtaagtcagtccgaaggcagtcttgttgcggtagcccaagttgaattcaaaaccctggtttttcattgcgcccgaattaatccaacggttgccaccttctcccaatactcccactcctgccatttcagtcaggatatcggttgttttcttgtaatagtattccaatgaaccgtacaaggattgcttgaacaggctgaagtcgataccgacgttcgtctgtgtggttgtctcccacttgatattgtcattaccgatctggttacgtttgaatccggaaggcagagtaccgcctccgttagaacctgtaatatcgtatgccgtaccgtagctttgaccgccaaatgaatctgttgttccataattaggagcgtagatagtgtaacgggcaaggttggagatttcctgattaccggtctgtccccatgaagcacgcagtttcagatcgtccaaccaagtcagttccttcataaagctctcctgtgtgatgcgccatcccaaagaaacggaaggaaaagtggcataacgatggtttttaccgaagcgggaagaaccgtcacgacggagcgtcaatgaaagcagatatttgtctgcataagaatagttcattttgccgaagaaagagacaagcgagtaaccttcaccggcaccataagcctgtgctgtgccgctacctgcatcgggccacatatagtcgggagtaaggatagagaaatcttctttatagccggagaaatgactgtcgtcttcccggttcagctccatacctgccatgacgtctccacgatgcttgcctatttctaactggtaagtggcaatggcattccacatccatttggtccagtgttcctgtttggcttctacggcactcttgccgttgttggtctgtgttccttcctgataaggataggtgaagtaacgggcttgtttgtttgcgtagtccaaaccaaaagtagaacgaacattgaatcctttgaagaggcttagattcacataagcatcaccgaacatacgccagtaagtgtatcggttgtctttgttgtattcaagtaccgcgcgaggattacgacggtccggccatccgcctaccggtcctccccatgaaccatccgaagcataaacggggatagcggaaggaatgtccaaagcagtttcaataattccgccgggagcttgtacttccgaagtacggtttaaggtgaaatgctgaccgatagtcaatatatcatcaattaatttataatcgctgttcatacgggcggaaaaacggtcgaagtctgtatctttgattacacccaggtttttgtaatatcccagagagaagaaggaagaacctttctccgaaccgttgctgacagaaagattgtattgctggatgacacctgtacgggtaatttcatcaaaccagtcggtatctgccacaggcattgtattcttcgagtccaggtatttggaaagactcataccgtatagtaccggatttccgttggcattgtagccccaattatagttatatcccaaagcattaccattcgggttctcaccatcgtttacataggcttgccacatggcacgtccgtactgttccgtattcaacacatccatcttactttgatacatggaagctgaaaccgaagcatcaaagtttactttaatctgacctttctttccttgtttggtagtaatgatgataacgccatttgcagcacgcgaaccatagatagatgccgaagcagcatctttcagtacttgaatggattcaatgtcgtttccgttcaattcgtgcataccggctttggtaggaactccgtcgatgatataaagaggatcgttgttgttcagcgtaccgataccacgaatacgtacggtagccgatccgctcggatttccatctgccgtaatattcataccgggtacgcggccttgaagtgctttcaccgggttgttctccccttgcttctggatttcgtcgactttcactacggaaacagcaccggtcaggtcggctttacgttgagtggtataacctgttacgaccacttcatctaccatttgagtgtcttcctccaataatacattaacgatagtagccgattttacggtcaccggtttataaccaatatacgtaatctttaaagtagagttagctggaaccgaaagggtgaaattaccatctaaatcagtaattgttccattagcagtagctgtagcttcaacaacagaggcgccgatgaccggctgtccgtccgttttagaagtaacgtttcctttcactgttatgttttgcccccaaaggactgacatgaaagcaaacaggaaacaaacgctgcaaagaagttttttgttcttcataatacgatgcattagtttgatgttattaaattaaaagtacgaattttatctatatcgataatgcaaattacggttgatttatatcaaacgactgaaaaaaatgtttcaaaggctataacaattgttgcatagcacgctattttatagggttttatacatgttttcttcttgctatgagaaaaatgagatttatattctcttatgttgattgaaagtggtatctttgtgtagtgatatgagcccccaaattgagaagactcttcattaagataacaaccaattaaagattctaaaaacagaattcatgactaaacaacaagcattaaagctctttgaggaaaaaaaagtacgtacggtatgggatgatgaacaagagaagtggtatttttcgatagtagatgtggttagcattttaactgaaagtaccgatggacgtaaatattggaataagctgaaacagagacttaaagaagagggaaatgaaacggtgacaaattgtcaccagttgaaaatgcaggcagttgatggcaaaatgcgccttaccgatgtcgccgacaccgaacagcttctccgccttatccaatccatcccctccccaaaagcagaaccattcaaattatggatggctcaagttgccagtgaacggctcaatcaaatacaagaccccgaattatccatcgaacaggctctacaagattataaacgcttggggtattccgacaattggattaaccaacgtttgaaatcaattgaaatccgtaaagaccttactgacgaatggaaaaaacgaggtctgcaagaaggcgttcaatttgccacattaacggatgtaatctatcagacctggtcggatatgacatctaaagagtacaaacaatttaaaggattgaaaaaagaaaacctacgggataatatgaccaataaagaattggtattaaatatgcttgccgaactttctactaaagaaatatccgaaatcagcgatcccgaaacattcaatgaccacatagatattgctcaacaaggtggagaagttgcccgcaatgcccgactggaactggaggctaaaacgggcaagagagtaatctctcctcttaatgcaaaaagtggtattctactgaaaggtaaatctgaatacgaattgaaagacggattgaaagatgaaccgaaagataaatgaaaaattaccctcaaaataatccaataaataaacgatatgaaaacaatctccaacaaacaactcacgattcaagtatctcctcacggagctgaactttgcagtatcttcgccaatggaaaaaaatatctgtggcaagccgatcctgctttttggaaacgtcactctcctgtcctattccccattgttgggagcgtatgggaaaatgagtatcgtaacgaggggattccttatacgcttactcaacatggttttgcccgtgacatggaatttacgattgttactgaaaaagaggatgaagtgcgttaccgtcttgtcagcaatgaagagactttgcagaaatacccttttccattctgtctggaaataggctatcgcattcagggaaagcaaattgaagttatgtggaaagtaaagaataacggcaacaaggaaatgtactttcagattggagcacatccagctttctattggccggagttcgatgcaagcaattctgaaagagggttcttcggatttgacaaggaaaacggtttgaaatatattctcatttcagaaaagggatgcgctgatccttccacagaatattctttagagttgacagacggattattaccactggacacgcatacttttgataaagatgctttgatactggagaatgaacaggtccgtaaagttaccttatataataaagagaaacaggcttatcttagtttacattttaacgctccggtagtcggtctttggtctccacctgcaaagaatgctcctttcgtctgcatcgaaccttggtacggacgttgcgaccgcgcacattatactggtgaatataaagataaggactggatgcagcacttacaaccggaagagatattccaaggaggatatacaattgaaattgatgaataattaatgaataaaagtagctgccggatttcacatctgacagctaccaaacacctaattctaatttacaaaacctaacttataaatctaacctatgaatccttaaaaagcaatcaatacttgttgctttcactgaatctatgtaaacacctattgtgtaacttctatttctattataaacccaaccgatacgccttgaatgaatctacttgaaatgaacctcctttgctataaaaacacatacggttgtatggttccgatggaaagataagattagtcattgctacctttcctccattcaagaatatttctacagaacatttatcaacaaagacatccaacgtatattcattctctttctttatcggtgcccaggtagctaatgcgaaatcatctatataattgatggaagtcgtctttctgcggtcgtgaacctctatttcatgaagtacactcttctttccgaaatccacgataccacttttcgtccggtccataaccaatctcttttccggaagattgaagtagatatccaccttttcccctttatcattaaagaggctgaatcccataatctccgcttccccggcggtaatttccaatgccagttcataagcaccatcattatcagccaataaagaatcaatatgacaatcattggcaaccgtaaatgccggaatctctttcttttcttttcgcagagtctttatctccagtatcggagctgctgaaagataaatttcaccgtcttgtgtataaagacttaactcacgcggcaaagcgttagcactacggaattgctttgtcggaacaatattacaatattgccagttactcatccaaggaacagcaatcgttcgttctccagtgtttgagaaacaaacggtagcatagtgatctttgccccaatccaaccatttcgtgacattcggctgactgtcacaactgaatttcgttccatcaaagtttcctgtaaagtattgggtagcacttcctccgaaataacatcccggattgacgttcactatcaatgcccatttcttacggttcagatctccatccaccggaagttccaccatgtccggacattcaaattgacaaggctgtgccccgtatccttctccaaaactactcatatagttccagtccttcagattcttagagtcatagaaacgcatttctttatcggcggagacaatcatcacccatttatcttccggttcataccggaacacttttgggtcacggaaatctctcaaaccatcagcagggcacaagatggggttcttctcatatttagtaaatgtccgtccattatccttgctaaaagcaagacattggatctgcccgtttttatcactggcagaagtataaaaagccaggatactccctgctccgtaacccgctatattctcctgatcgacaatagagctaccggaaaagatatgtcccaatgtatcacgggcaatagctggttccagatgttcccaatgcatcaggtctttgctgacagaatgtccccaatgcatatttccccatttagagccgtaaggattatattgaaaatacaaatgatattctccatctttatacaccaatccgttggcatcattcatccagccatagagaggagtatgatggtaaacagggcggaacttttccgtattggctgtatcaaaagtatcagatagtttgatttctttccagcaaagtgcatcctttgatttattacgaacacacacggtggcagtcttcactccggcaggcaaagcaaagggaacaaaataatccacttgattctgtgccaaacgaatatccatatcggtatcggcagcttctcctgtattgaggagaacctgactttccgctgcttcctcttctataggaagcaatatataattagtcggattagtgatgtggatgacagtcaggctatcgcttttctgttccaaggtcaacttgcttttagtagtgtggcaataagtcagtccataagagactgctaacgcaagtattgcacctttacatagtttcatccaagggtttgttttcatggcaacaaagtattcctagtttatatctaacaagacgaaggcaaagataggaggtatcttcgccttcgtctataaactttgtttcaaagggtatcaaatttgatacaaatcctaagaattttcttttatcatccaagaataaagacctgtaacctctttgttttcctgaatttatttttctacttttgaagccaatctttattcttctacttatgccagcaaatagaaatgccttaatccgttataaaacaattgataactgtctgcgtaatccttatcgacgctggacgttggaagatttggtagatgcttgctcggatgctctttatgaatacgaaggcatcgataaaggcataagcaaacgtacggtacaaatggatatacagatgatgcgcagcgagaagctgggttataacgctccgattgtggtgtacgaaaataaatactataaatacgaagatccggaatacagcattacacaaactccgctgaacgaacaagacctgaaaacgatgtcggaagccgtggaagtgttgaggcagtttaaaggtttctcctattttacggaaatgagcgatattatcaaccgcttggaagatcacgttgcttctgcccggatgaaaaccactcctatcattgactttgaaaagaatgaatcgttgaaaggactggattatctggatacgatctatcacgcgattgtaaacgagcatccgatacagctcaaatatcgttcgttcaaggcacgttcggccaacagctttattttttatccttatctattaaaagaatatcgcaaccggtggttcgtttatggtgtcagaggaaacggacggatcttgcaaaatttagctttggacagaatacaatcattggaagttctgccacaagaacattacataaaaaatacgttcttcgatccgaacacgttcttcgatgatctggtaggagtcactaaaaactccggaagcgtagcggagaaaatcggtttcaaggtagccgctgccgaagcaccttacatcataaccaagcctatacaccgcagccagcaagtggtggaaagattggctgacggaagtgtcatactggaaattgaagtcgtcatcaaccatgagttagaacgagtattcttcggatatgccgagggaatacaagttctttatccgaagactctggtagaattgatgggtaggaaactaaaaaaggctgctgaacaatatacccattcgaaatgaaaagggaacacgcccaattatcctatctgacattcaaaaaaaacaaaaaagcatggagagcctgtctattgttcaactatggagactttattcttcaagtaaggctctcgcacattcgtacccttcctgataaaactctgtcagcttttgcacatctttctcgatgcggtctacggctacaggttttaacgggcgaataacaataatctgtccttcatcctccatgcgctctaccatttccaactgctcattataaacagcacaccgccgacttaacgcttcgcgcaacttcggatatttccgatatacaaacgaagggatacgaatgtctttcgaatctttccgatacccccgattacgggtgagtaccacaacatttctcgtgcagccatccgtaatggctctttgcaaaggtatggaatctacaattcctccatcgagcatgggaaccccgtctacataagtaataggacatacaaaagggagactgctggatgcgcggacaatatcaatcaccctgcgactgtcttttttctcttcgaaatagttggcttctcccgtgatgcaattcgtagtcaccatcacaaaacgttccggtgaagcaaaatatgtttcataatcgtaaggaagaatatgttcggggaattcattgaataatagatcaaagtccagtatattacgttttttgagcaaatgtttcagaccgatataatcatacttctccaacaagtcaatgttgctgtatttggcacgtccccgttgccgtgatgcatacgacaacccgttgcacgcacccgcagacactcctatcgcatagggaaaccggatatcgtgatccataaaataatcaagcacaccgcaggtgaatactccacgcattcccccgccttccaacactaatcccgtagattcatcaattttcaagtccttcatttttatctcccgtattcttattccggcggattaccagcaaagatgacaattcacgcatcacagcctcatcctcggataatttcgtataagaaagatggctcattatcaataatccgtctttctcttcagtcactaaatcttctactccctcaaagcacactatcatcgtttgttccggataacgcacctgcaaatcgtcaatgcgtccacggaactcttcatcgtccgtatcaaaaagaaaaagacgtaccgaatgtccgttctgtaacatcttatccaaataggaaaaaagaaacagatcaatcattccaccaagtacgaaactgactgtcgcgccttcccgatactgacgattgacaaatacggccaccggacacttcacctgctccataatctcatcaatcttatcccggaagagcgttaaccataaaattgctcccggagttcccggcatatccgaacgataatgactcccggctcccaaaagcagcatatcaggatgttcgttacggacaaagtggatgatttcctgtacaagtttgtctgtcacccgataatggttatctacctggatatttaatttcgctgcctgttgattgagcaaagcaaaactctcgctggcataatgttcggcattcaacggattcagatccgtacccaccgtatagtgtgctgcaatcaaatgatttttcttcaaatgcttcccaaataacaaatcataaatggaaagcaacacacgcccggattccggacgcccgaaacaaaatatcaatttgtgcttcaaagataatttttcttcccgacgtacgaaaatatgttccaccaaatgaagcaaaggagtagtcataaaggtcgtaactagcgccataatgaccaaaattacgaatatagagggaggaagaactcccatttcataaccgatattcaaagcgacaagctccatcaatccccgtgtattcatcaatgtccctatcgtcaaactatccttccacgactcacccaccaaacgggcggcaatggcacatccacccagtttgccgacaacagcaaccgtcaccaacagtaaacatatcatccacaactccggactgtttatcaaaccgatttccgtgcgtaatccggtgaaggcaaagaacagaggtaaaaagaatactaatgaaatatcctccaccttctccatcatcacctttcggaaacccagattggacggcatcactacccctgccataaaggccccgaacagtgcatgaataccaataatctcggtcaggcaagaagaaataataagaatgagcagaataaatgccacgaatgttttattgattgcttcccggttggcatatacttctcctaccttcttcaaaaacggacgaactaccagaaacatgactgcaatatacacaactgccagtcctactgaataaagtgcgctggcaaaacttcctgctttggagatagcaatcaccactgccaacagacaccaggctgtcacatcatcattggcagcggaagcaatggtcagcgttcctaaaggagtcttcgtcatattccgctcctgaatgatgcgtgccaataccggaaaagcggtgatactcatagaaatacctataaacaaggcaaatggaagaaacggagtttgggcagctgcatattcttcgtacacccagtaagaagacaagatgcccaggaagaagggtactaagattccggcatggctaatcaccagcgtttcattgattttatttttcagtacactgaaatccagctccataccgatgacaaacataaaaaggatcagtcccacctgactcaacagttcaagattggtaagcgagtgtgccggaaaaaggaaatgaaaagcatccggaaagaaaaagccgagtacggaaggtcctaacacaataccggcaacaatctctccaatcactcccggttgcccgatcagactgaacaaatagccaaaaagacgcaccatcagcagtacggctataatctgaatcaacaaggtagtgagcggatgatgaagattatcctgtataaactggagaaacatagtgaaaggattcccctgtaccatgttctgcgcatttaccgcatagtgcgaaaaccggtcaccctcttcaatagcaacataaatcaaccctccaaacaggagtaacatcagtacataaatgacataattcttccgggccctgttccgcataaactttatttttacgatttgtgcatatttatggtaaaaacaaacgaaaaaggcagatagtttggcgaaaataacaaattctcaaataaaatcttgtttttttgcttcaatctatgtaactttaggctagcttaattgtttaaggaggaaaaaatcaaaaaagtcctgcccgcaggcaagcaccatgagaatacagtttgagattaaagaaaatttgccggaaattatcgaagaaatcttacactctgataagtggcaaacttccgtgaaggaagaactgagcggtcggacgaccgttgtgatccgtgaccaagcgtatggttcagaagctaccattgaaatttatgctacatctattgaaatcaaaaccgcatggtcaaagtactcctatcgtatatttgtaaccaacgatatcgtatggtgcgaatataacggtgcctatcgtggtctgttggaacaagtgctcctacctactattactcctaaagaaaacctactcaattctgatgtgaccgaaagttcgctctacggaaatgagcataggaaattgagagagtatgcggaagataacctgaaactgaaacaattccgccgggaaaacttcaatgaacaaaagaatggaaccgcaccattcgatcatcccaagcgtgtgtatgatgagtttatcaaagaagattatgtagtagcatccaaagaagaagagaaaaaataatctgtacttaatgctttaccttgtgccatcgtattggcacaacagtgccaccacattgacacagtcgtgccagtaaggtggcatgattgtgccaataaggtggcattaataaacaactcctaaattatccaagtcgtcctttgatatggcaaattcatccccggctttcactcgctccagcactaagtttcctatacatcgggcatcctgttccgattgaaaagctcttttcccggaaacaaccgggataaaaggttgaacaattatcaaacgctctctctcataaattttatagccgtacccactacctccaacccgggtcacttccaaacggtatctatttaccggatgcacatacacatacatgattcccactaaaagcagcaagacaaagcaactaatacctattatttttttatttctcttcatattcataaggcttcaactcccaagtatcatcgtaataataagtagaagctcctcccgtagctataattccccgttttccagtagaaaagcatacggctttcgagcgtgtacttccttcgaaatctgtcaaatcttccccatcccagaggtctgtcagagggtcgtaaatccaataattggaacgataactaccaccagcagtctgccccgcagcaatgtatcctttaccgtcgatcacgaaagcacaagcataagaacggacgatagaagtgtaatcgtcgtcataatcatcatcactcttatcgtaaagttcgcgcaattctttccaagtacccgttgccggattaaaacaccagaaatccgtcacatccgaaccgttattttcaccgccgcagatataagctatatcatctatgacgaaggccataccgcccattctcttctgtccgccaaatccactcatggctgtccattctcctttatctcccaccgacgggtcgaacttccagaaatccttttgataattatcgttgtaacctgtacccagatacccatactgaccaatgccgaaagaaagtgcataataccgtttaccatagatattagtcccatcagttccatccgggatagaagccatctccttccaggaatttgtggcaggatcatactgccagcaatcattcagataatccttttttgtcgcatcgtaaccggtagcaatatatcctttggtacctactgcaaaacctgtagccgcatttcgggcaggagccgcatcgggcattgatgtacactgtgtccacgaattagcctcgatgtcatacgcccagcaatctttcaaacggtctttggtactcccccggtatccggtgcagaggtaccctacgttaccaatcgtaaaaccagctgcgtccgtacgcgccacaccatcaaaatcagaacggcgataccacacacctgccgtatattcagtatcatccgtacatgccgccaatgaaagcagcaccaccatcatgcaaagtaatttattcattttcgtattcataaatatgtcgttgattacaaccgcaaatgtaggcggcaacgggcacgcataaaaaaactatcgacaaataaagacattctatctaccaacaaaattcaggtcgacaaatacagagatttagtcgatagttttttggaggactatttaaaacctcttcttttgccggtacaaaaccaatttcattttactacatgaagtcaatcatactacttttttcattctttatatctctttcttttttcgcttgtgtagacgattcatcgtccataggagcgaaatgggtacaaagttcattcctcaacgaacagatggatacttgtacggtattacttagtacagtattaagcgactccatagccacttcgggagatacggtttgccagataggataccgtgacgacaacttatgggggaaaattaccgcctctttttacgcagagtatgaagtaccttcctattcttttgatgaaaacatccaatatgagttcgactcgatcaccatacgcctgtattcttcgggcaattacctgggagatacactaaaaacccaacgcattcatctgcatgaactgacaaagaatatagaactggacgatagagggtacctatacaacactactactgcctattacaacgaaactccactggcatctttcgactttcgtcctactccgggctcaccgagcgaagaactggaaatacgattgccggatgcatggggagaagaatggttcaacttgatgctgaatgatggccgatgggtgcaatcccaggatttcttccatgattatttcaagggaattgcttttatacccgatgcaaatgacgcttgtatcagcggatttcaagtcaacgactccagtatgtgcatcacggtctactatcaccagattacggaaacactgaacgaaaaaacactggttttcaatacaagcaacacgctgacttacaacaaaatagaacaagaccgctcaaacatcccgatagccaacctgcaaagtggggacggcaatgaatactcttccggaaaaagcgagcatcaggtctacctgcagggaatgacaggtatgtatgtcaccatcgacttcccacatttaaataatctctgcgaaaaaggagagcttgtgactatcgagagcgcaacgttacagttatatccggtaaaaggaacttatgacggcatgtacccgttgcccaaaagcctggctctctacaccgccaacaatgaaaatgtgacgcaaagtgtaatcaccgacctcaccgggagttccgtacaaagcggaaatctagtagtcgacgagatgtcttatgaggagacttattactcttttgacatcacctctttcctgcaaacaaacctgggaactaccggatatgatcgtcagaaactacaattatttcttccggacaacttgttctataccacacttcaaggcgttattttcggcgacggagaacataccgccaataaaaagaataccaaacttatcatactttacaaaacttatcaacaatgaaaaagattttgttttgccttctggcattctatactcctgtctctatagttattgcacaaaatacaacgaactcccctacttccatgttcggactgggagaactttctaccggggaaggcgggcaatatgccggactgggcggcacaggcattgcattgcgaggaaataatttccttaacaatgccaatccggcttcactcacagagttgaccgaacaacgcttccagatcgatgccggtatcatgggagcataccagatttattcgcaacgaggagcaagtaaccgttccgtcaccggaaatctgaataacctaagtatcggctgccggattatgccacgctggtatggagcaattttcatggctcccgtcagcagtgtgggatatgccatcacgctggatgaagaagtggcaggcaccaatggaggtactatctcttctctctttcagggtgaaggaggactttccaagatgggtatcagcacggcttaccttttcggaaaaagattttctgtcggcaccaatctttcttatgtgacggggaccatcacacaaacggagacgcaaggtactgccacagaagaaaccagctcctacaaacatactttttatgcggatttcggtgtacagtataaatgggctatagaccgcgaacgttctttcgttgccggtgccgtatatggttactcgcaggattttaagcaggataataacttatacgttagtagcagttcgggaggagatgatattgaaaaaagcctgaaacgctatcgccaatgtcttcctcaattctttgggctcggagcttcctacaacactctacgttggatggcaaccatcgactacaaatatgtggactggagccggatgcaatcttcccaatccaatgtcagttttgagaatcaacaccggttatcagtcggtggaagatatacattgggcaatgtctatcgtaatccggtcagcatcctattgggaacaggtattaataattcctatatcgtcattcaaaagaaaaaggcaaccgaatattacgtcagtaccggacttaacttcggattgcgcaataacaacgtcctttctatcggattgaaatataaaggccagatgaaaattcctaacggtatgcaaaaagaaaacagcctttccctgttcctgaatattactttctccgagcgaacttaccgcgccaagatacaataaaatgtcataaaacggaagtcattaagatagctgtccatttgaaaaaagagaaaactttgtgaaactctgtgttactctgtggtgaaactttcctatatttgtagccaaaacaatttaatattaatttcataggaatgaaaaagacaatccttattgctgctttaggcctgttcagcctaagtgttatggcacaagatgcaaaacctgaagaaggttttgttttcacgacagtgaaagaaaatccgataacttctatcaagaaccaaaatcgttcgagtacttgctggagtttctcaactctcggatttgttgaatcagaactacttcgtttaggtaaaggtgaatacgacctgtctgaaatgtttgttgtacacaaaacgatgcaggatcgcggagtaaactatgtacgttatcacggtgacagttctttctctccgggtggaagtttttatgatgtaatgtattgcatcaagaattatggtatcgttccgcaagaagtgatgccgggtattatgtatggtgatacgctgccggtacataatgagctggatgctgttgcttccggttatatcaatgcgattgcaaaaggtaaattaagcaaactgactccggtatggaaaaacggactaagtgccatttatgacacttacctaggagcatgtccggagaagttcacctacaaaggcaaagaatatactccgaagacttttgccgaatcactgggattgaactataacgactatgtatcactgacttcttatacacaccatccgttctattctcaattcgccatcgaaattcaggataactggcgtaatggtctgtcttacaacctgcctatcgaagaactgatggctgttatggacaatgctgtaaagaaaggctatacctttgcatggggtagcgatgtcagcgaacaaggattctcacgtgacggtatcgccgtaatgccagatgcagccaaagaatctgaactgtccggttcagacatggcccgttggacaggattgactgccgccgacaaacgcagagaactattcaccaaacctttccctgaaaaggatattacccaggaaatgcgtcaagttgcttttgacaactgggaaacaacagacgaccacggaatggtaatctacggcatcgctaaagaccagaacggaaaagaatacttcatggtgaaaaactcttggggtaaatcaggcaaatatgatggtatctggtatgcttccaaagcattcgttgcctacaagacaatgaatatcctggtgcataaagatgcacttcctaaagaaattgccaaaaaactgggaattaaataattatttaagaaaggcttaatttcccaatgtattccgtaaatttctccttataattatcaccgacaggaatataagtattcttatcaaagataatgcgaagacgggaaacttcggtaatcttgcgaagattgacaatataagaacggtggacccgcatgaaatgcgtgggaagccgttcttccattttctggaggctggcaagcgttattacaggcttgtcctctccttccacaaagatacgcacatactcactcatcccctcaatatagcggatattcttcacatcgatgcgaaccactctgtaatcgctcttcacgaataatgaatctccttttatctgcgaagcatttcctatttcaccctgttgttccaacaaacgatattcaaattgcctgcgggctttatccgccgctttcaataaatcctggaactcaaacggtttcagcagataatctacggcatccagtttgaaaccctctaccgcatattcagaataagcagtagtgaaaatcaccaacggacggttcaccaaagaacgtatgaaatccaatccgttcaaatcgggcatattaatatccacaaagatcaaatcaacctcctcttcggacaatatcttcattgcctcgaacgcatcctggcatgactttaccaaagacaaaaaaggtacctgggatatataatccgacaactgcgtcaatgctaacggctcatcatctattgctatacatttcattctaataaaggtataataagtaagacatcaaatttatgttcctcttcggtaatggaaagcgtataatcattgccaaataaaagcctcaaccgcttacggatattctcgagtccgatgccatgatgctgttcgtcagccgaaccattattgctgttggaacaacggaatgaaagccggttgccctcatccaactgcatcaagacatgaataaaagactcgctccgataactgactccatgcttaaaagcattttccacaaaagagacaaaaagcaaaggaggaatctgcacttcgggcacttcggccggaaaatccatctgaatagatactttgttggtatagcgcaaactcatcagggcaatgtaatttttaagaaactgaacctcacgtgaaagcaaaatcgttttattactcgcttcataaagcacataacgcatcagtttagaaagttccacaatcgtacttttcgctttccccgtatcaatatccaccaacgcatgaatattattgagcgtattcatgaagaaatgaggattaatctgatatttcaaatactgcagttccgactgcaaacgttgatgttccagttccttcagcatttcttcatcacggaaagatttaaagaaaagtttgatggcgatattgaaccctaccatcaaaaaggcaatgatgaaatgaataagatagcggagcacaaaaggaggataaggaaaaggagtcggttttggaaatcttccgggaccatttggatctcccattcccctaggacgttgttcgggattggattcatgccaatgcacatccccttcctccctcgccttttctctcgtcttaataatctggtccctccggttctccttcatacgaagaggcaactctcctcgcttgaaatctttggggaaatgattggcagaaggaaacggagaaagccaacaaatcattcctattacaaaaatcaacgaaacagtatattgccagtaccttttcttaaaaagaaaatagggaaccagcccataattatttaacaggaaaagcacgaaaaaaggaaggatactcaaccatgattcgcggatcaccatacgggtttcctcccgttcaagtcctccactcatggcaaagtatccgcctatcagcggaagaagaaatattacgatccagatagctccgtaaatactctgctccagcacgtgttgtttacgcagtcttttcatgcctcattgcttctgattgtcgaaacaaagataaaaccgaacctgttttatcacaaatagaatcgaccaaagaacggatttcgacggtaaactgctgtttaccatccccatccaccaggtccatgtccaccgcctccaccaccgggctggccaccgccggaagtgctgccgacttgtgtcaccatcgaactggcagtaaatgttgccgcctgcgtgccaccggaataagtggctcccgaatataacccgaagaactcggaaccaccggaaaccgttcctccttttgagatagtataactaccgcccgaggtcagattcggactactgaacaataccgtcatttgagaataagcacggggaatctgataggtcagtacgctggttccgtcggccgactggatattcagtatttctccgttacttcccgaaccgccatagatcacagtgcgttgcgtacatacacttgatgtaggtgtacttgttcctcctccaatacccagaacaatccccccggtaatcttaaaggtattctgatcgcaatcgaatccgtcttcgggagaagtagtacccgacgatacgatcactccccccgtaatggtcaacgtaccattagagtcaatgccgtcatttccggaactataacaataaatattgccaccattaagaacaatgctgttacttgcattcatacagtcatcgtaacaaagcgcggcaactgtaccctcattgacagtcaacacacttttactctcgataccctcactaccttccccaccggtagccttcacaagcaccgttcctccattgattgtcaacgcaccgtccgctttgattccttttgccgacgagtcgagcttgccatatacacactgcgtaccggtagttatcactttcaccgtgccgtcattgatggtaatcgaaccgtcacagttgatacctttaccggctccacctgtactctgaatagcgatttcccctcctgtaatcaggatatttccgtcacatttaattcctgcacacgaacttaaatcattatcttcataaagagcggtttgagaagtgaatgcagtcagctttcctccggagatggtcaggttaccatcacaggatattcctttggaggctgctcccgccacttgtgcctgaatagcaccgccactgattaccacatccagacaggatttcaacccatgcgctttattatccgttgtagagagttttgcaaagcctccggtcatcgtaattcctccctcttcacactgaatagcatcgccgtctgaagatatattcagtattccgccgccgataatcacagattcattggtatggattccatcttttttggccgaaactaccgtaatattacacccgctacggaaacgcacataatcatcgcttgtgatggcatgtttataatttccggtaactgtgagtgaaccgcctccactgaaaatgagctgcccctcactgaacagacaggctttcatatcctctccatcagtagttgccgtataagaagacccatctgtcaacacattcgttgtttcatccgcgcataccacaaacacacgtttggaagactggatattaatggcagcacctaccggattgagtatagacacccccgccagtgataatttgaatttcttttcgctgtataccttgaacgagccgttcgtagtagtcccgttcaacacatactctactccgctgaccgtagaattgaccacaatatgcgccccattggaagatacttccactccggaaactccattacctaccgtggcagtcgttccattataggtaatcgtcaccacggaggcaaattgggagttctctataaaatcatcatcggaagtgaccgtttccgacatgcttccatacgtcgtcctatcactttcatcaaaagcgattgtaaatcccaataagtcttccgatccctcgggaatcgtcgggttgggctgactgcttcctccacctcccgaaccttcgaccaatattccttcctgatcgccgaaatcgaatgattccgtcgtacaattcaccaacaacagcaataaaagcggtatccaaaacaacactattcttttcataatttctcgttttatatattaaaacttaaatgaatatcctgcaccgatcacatgcccgtttgcctcatcgtcgtctgccttattctgatacagataataaaaatcgagagcatgtttcttacttagtttccattccgtccccaatgtccatcgcaacttttcaaaagcaccgatctcattcaacgaatatgaaagttcacatgaagtataaggcgtaaaagcacatttacgtatattatattccacctgaagacgggaacgaagcacattttttccttttccactgatatattcatcattcttcacactcccgtcatcaccatcgaatttgggaaccgactgactgggacgataagtatattgccaccgttcacgaagggaaaacgtgaagcggcgccagtccacctttcctgttaatgacaagtttacacgatgtttcggctgccaatattcggggatatagtttccttttttagtgacttccatcggatggtaataatgaataaacgtatatcctgcggatgctttcagccaacgaaacatcttataggaaacacctgccgaacccgaccagcgttccaccgtctgcaatccgtctcttgtacggaattcaccttccagagaagcatcgaaaccggagaatatctttttcttcacttccgcactggtccacacgccgaaatcatctccctgtgcataactcttccctgccatacacaacaataacaggcaaccaaccaggtatctgcctgtatcccagagtctcttcttactttctctgcctgacttatcttccatttccttattcattttctttaggtaagcgggtcaacgtatcaatcgtatttatctcatctttcagcggttcatagtagattttcagcatggctgtatcccgtaaaaaatcgatatgtcccacttccacacgaacaatgtcaagtcctgtccgttcgcggagatcgcgcaataagtccaattctctttcgggttttatcagttctatcctgtcatattgaatcaatttacaggagatatgtttcagccagcgattgctttcgcaaagccatatactgacaatgaaaagcaagttggtacataccagttcggcataactgatttctacggcaagagcattgattaccgaaatggcaatgataacaaaaagataagtcatctcacgcacgggcattgactcggtccgatagcgaatgataccgaaaatggcaaataaaccgagcgcaaaacctattttcagtttgacacttcccaataagaaaatcatcaggaaaatgctgatgcttatcagcgtaaaggtgaaataataatcacgccgtttgctcttggggtaataaaacagatgaataatgcaggataccaccagtaaattgaagcagaatcgcaacaacaattccaggaaacctgcgctatccatcaatggtgtttctattaatgtaatatcacttagttcatcaaacatattattcaggttttatattaaatattcattagttgcttctttgctatcttctgtgccattctcaacttgggtttaaaccgattatattttaagttcccggctgtgagtacggttcccacacaatatttactaattcccgaaggccgcacatgcagttcgcgcagtatttcaccgatgggtgaataagttctcccgtcgcgcttcagttctatgatggcaagattttccaatcttgcttctgttccggttatgagatgatggaaatgcacaccggtatcgatggtcagccgttctgtcattgccttattcaccaatgtaatacgatgaaaatgattttccagtagaagtttcaaggtagacaactcataccaggcataattgcgaagaaactcttctcctccatcctgacgcaacgagtttactccttgtacccggatccgctttttatctgtcctccctttattattcttatttttcacttccaggaaagtcagaccggaagagacatacgtccttacacggattttctcacggatcactcttccgttttgatgagccagatacatggcgtaatcgggagtgtcgagataggtagtgtgataaactatattccgttctccctgcacctcctgcacacgataacagttacttgcccgttgcaatacgtccatcagggcagagagtgaaacgatatactttgtgtcggtacggttcatcaaacggatggtactcatctcttccaaagaaatggaggagaaagcggaaagtgcggtggtcacattacatgtctcgttcatattcataggggattagagtagcaaatgttacaatactgtaacaaatgtatgacagagaagcagaaaaaggaaaaaaaatcaatgaacgggggattcttatcggtgaatcgactgtattacagcaataaacagttctgttctatttttaagattctattattcagcaatggccatgaatcgaatcaaatagaaaataaaatgcctaatttagtgcaagaatatgcacatcaccccccttattatgcataaataaaggataaacagaccgtttttcattgtatgaaaacgtccgttcttttaatgaaaggtatccttggtcggtgaggaacgcctccttgctcaccgaccaagctaccgttcatcggtgagcaaggatttgtagattgaaataagagtcgtttccaagctatttcacttctaacttcgctgattgctgatctggcaaatagctatacatcagaaaaagagagattcatttattccgattctgacgtaagattagtgcaaaaagaatgatttatcagcaaagtgctaccttttcacattcttcaaacaaacatttaagctccttttgaattgctgccctcacaccggttctaattaaagcagggaaaatgtataaaacatcctgtttttatgtatagcccaattttaagcaaacaaagatttatttctcgcgatattccagcggagtcatcttcacctgtttacggaagtatttattgaaaaaggaatgattgttaaagcccaaagagaatgctatttcttttaccggcaaccgggtggttttcagttgtgctttcgcgttcatgataataatctccgtgatgattgccaacggactgtatccgcttgctctccgaattgcactagagaaatgcgctgcagtaactccacacttttctgcataaaatgccacttcatgctcactggtataatgagccatcagcagctgtataaactgcctgtacaactcctgctctcttctcaaaggttcgtcaagcttcctgccatagcgtttatacagttctttcgttccctgtaagaaaatagccagtatggagcgtattatgtctttattttccaatgaatgtggaagtgtataagcacgaatcagcaaaagatatacatttcgatacaagccggcaatatcgtcttgcagagaaatgacagggctatttaagatcataggcatagagtctagcaggatttccacatagttgccggaaagcataaaatcggatgaaaaaccggcaaaagaaatgcgggtatcagacgaaacttcgtgtatctgaataaacgaattaggaaggacaattacaaaatcattcttacgaatgacaacctccaacaaattaatggtagctttcaccatcccttcggtacagagtacaaagacaccggcttttattttgcatgggaaattactgtaatagtttaaaatatccccagtgatactatcatctgctataaaatcaatcggaaggtcaaatttgggaaaggagtcgtttattatcatcgtctagttttttagtttatcaaaaatatccattccatccgaattccaaacaaagagttcaaaaatggtatcttatatcttacaaacagaacattgttttcttctttattaggagtgttttttagaaaataacaaagatagaacattgaatcccaagaatggagcttgacggcagtcacctattcaccgtactttgcactgttttaaataatacattaaaataaaacctaaaagagaatgagaactttgaaaaaacttctttatgtagcttgtacagcttccctccttacatcttgcgaggaaacctataatgacaagctattctggccgggagagctcaaccaggagtatggctcatacatcaaaccagccactttagacctgacctacagcggagaaaaacttgttggaaaaactgtcgatttcaaaacagacgacagtgaaaaaggaaccatcacactgaacgacattattccgggagaaaaaacaactcctatccaaatcgatttatgcgaacagggagattcctatacattcagtggaaagaatatcacaatgaaaggggcaacggtgacatacagcggaaccctcactccgaaaacgatgaaactggatttgaatgtagcaatgccacaaagtaaatggggaaaaagttacggtttatccggctttacgaaaggcaagaaaatgattgtcggaaccagtggaggacaatacgtatggaaagaatcatcgagtgaaatattgaccggagcattctatgtccatctggacgatgtagaattaaccaaatcgggcagcacactgttcatgagaatgaaactggttcagaatgcgctttgctatttcatcccgcaacttcttcaatcagtcaccttgcaacccgacggtaacgtgatcgccaattacactaccagtccggtatatattggcagtatccctatcagtaacatagatcccgataaagatacggggacgattgccctatttgtcatcaagttcatgcttggtacattaaaagagagcgacattaccagtgtgctggcagatcgcacatgggcggcttcccccatcaatctgattacctgggcagcaaacaacggacagattaagatgaacctcaatctgccggccatcatcggtctgactacccaggacggtgagactcccatagatccgggactgatttcaggcattacggaagctcttgccaagtcgaaccctattcaattgaaaaagttgcttggaactttaaatgccatactcgacaatcagttcctcggcatcattgctaatatggatgatgctagtttccggcaagtattctacttgctgaccgagggcattgtctttaacataatggaagaagagaacgggcataccaatctttatctggccaaagaatcgaccacggctttcattcagttattacccggattgcagccgatagtggaaggattgcttccggaaagcatggcgagcaatgcgaccttcaagaatctactcggatacctcatggcaaatgacgagaatggattgccttacctatggaattctgccaatacgattgatttgggactaggccttttacccccgaaataaacatcaaccatgaatatgaaagaaataaagaatatgaagaaattatctatactatttataagcagcctcatcggaacggcaggtttgatgacttcatgtagtgaagactatccaggaccggacccggtggacgtaacagcgaattactcgaataaatacttgagcaaatccaacctgacattaacttatgatggggatgaaatgactggcaaagcagtcgacttcagtacagtgaaaggagaaacggctaatgttactttttataatgtatttcccggagaagaaacactcaaactgactgatatacctatttccggagatgctaacggttactctttttccggcaacggcacgggaaatttaaccggcagtacctttaattatagcggacgtgtagaaaacggccagttgacagtgaacctgaccaatataaagatggtgaacagcgcacaaatggccaacacttatgcacttagcgacatcatatacggcagaggaaaggatatgatccgcaattcggataccggcctgtacgaatggggggaatccgatggtaaaatgattgccgcacctctttatgtagacatggatattgaactaagcagtgatggcagtttcctttatgcggtcatgacagggctggtgaaaggaatgggtggttatcttctggcacagcttctcgataacgtcaccttacaacctaacggatacatcacagccaattatacaacggatgaaatgatgctgggagagcagaagttcagtgaaataaacatggaagatcccgaatctatgaataaagtcgctacattcgttatgtataagttattcttaccttatccgatgggaggtttccagcaacaggatattatcaatgccacggagggggtaaaccggatttatgctccatctcccaaaggactggcctactggtatatgaagaacgatcatttctatctgaaactggatcttccggcaattatcattcaagtcatgaaatcgcaggggaaaagtatcgatcagaatctgatggctttattgacagacgctatcctgaattcagatccggttcaactcaagaatatattaagtactatcagcggtcaactggataattccatattatccatgctggcaggtctggataacgccactttccaaatgctgttcggctggataaaagagggaatccccatgcaaatggagaagaaagacggacacacttatctgtacgtaaccaaagatgcattgactccgttcattcctttcctccccagtctggaacctttgatggcaggtattcccaattttggtccgatgctgttcgacagttatatcatgccgctttataagggttggtctaccatcaccaaactgcatataggtatagaccttacagtcaacaactaataagaagcacctttctataaacaagaaaatacaagaacaatgaagaaaatatatattctaactttgctactatgcttcatcagctttgggaacagttttgctcaaacgctgaaaggacatatatatgacgctaaaaccaatgagccattagtaggagcagccgttacgtacaaattacaaggtaatcagggagtcgtgtcggacatcaacggggcttatgaaatcaaactgcccgagggcggagtcgatctggtcttcagttatgtgggctacgaagatgtgctgatgcctattgtgatcgacagacgtgaagtagtgaccaaagacgtttacatgagagaaagcaccaaactactggaagaagtagtggtcagtgccggacgttttgaacagaaactcagtaacgttaccgtttctatggatgtagtgaaagccggtgatattgcccgtcaggcaccaacggacatttcttccacactccgtacattgcccggcgtagacatcgtagacaaacaaccgtctatacgtggcggcagcggatggacttacggagtgggtgcacgcagccagattctggtggatggaatgagtacgctaaatcccaaaacaggagaaatcaactggaacaccgtgcctttggagaatatcgagcagattgaagttatcaaaggagcttcctccgtactgtacggttcgtcggctctgaacggtattatcaatatccgtaccgcacgtccgggattgactccgaaaacacgtttcagcgcatacgtaggtatctatggtgatgcggaaaatgacgaataccaatggagtgacaagagtttctggaaagaggataaatattcggtcaaacctattttacgcggaagtcttcttagtggtgtccgaaacccaatttacgaaggattcgatctctcccactcccgtcgtataggtaattttgatgtcagcgggagcatgaatcttttcaccgatgaaggataccgtcagcagggatacaacaagcgtttccgtatgggaggtaaccttacctatcatcaaccggacatgggaatgaaactgttgaactatggtttcaatattgatttcctttccaatcaatatggagacttctttatctggcgttcgccgacagaagtgtacaagccctctccttttaccaatatgggacgggaggacaacaacttccatatcgatccgtttatcaactacgtaaatccggagaatggtacgtcacataagattaaaggccgtttctattatagtgccgacaatatcgtgcgccccagccagggagcatccatcggtgatattctgggaaatatgggaacagacgcccagactattcagaatattgcaggcggtgattacagttcgctctatccggccttggtcggtatcggttcgggacttatcaacggaaatctggaagatgccatgaatggagtatttacctcattgggcaatattttcccgaatgcaacaactgccgattattgcgatctgatctcctgggtgatggacaacggggtacccggtgatttgggcggacttgcgaacggacaattaccgagtgatctgatcccctgggtatccggtatgctcaacccaacacgaaacactccgaaaacgcagactgacaaaagtacgaactactatctcgactatcaattcaacaagaaatgggacagtggtgcgcaaatcactacgggagccacttatgagcatgtacgttatgattccgccatcatggacgaggtctataaaagcgataacatagccgctttcttccagtatgaccagcgtttctgggatcgcttaagtgtatctgccggtgtacgtgccgaatattatcgggtgaacaatcatcatcgtgaagcggaaacaaagatcttcggaaccaaggttccattccgtccggtgttccgtgcaggattaaattatcagttggccgattacagctttatccgtgccagcttcggtcaaggttaccgtaatccgtccatcaatgaaaaatacctgcgcaaggatatcggtggagtcggtgtttatccgaatctggacattaagccggaaaaaggatttaacgcggaattggggattaagcaaggatacaaaatcggtaatttccagggatttgtagatgttgccggattctatacacagtataaagatatggttgaattccagttcggcctcttcaataatgccgattatacgatgattaacagtatcggcgatgctgtccgaatgttaactgacggtcaaggtttcggtattggagcacagttccataacgtatcgaaagcccagatctacggagtggaaatctcgacaaacggtgtttataactttaataagaacacgaagttgttctataatttaggatatgtatatactgaaccacgcgatgctgattatcaggagcgcaatgcggtagaaggactttataccgatcctcttcagatgaaagagaaatcgaacacaggtaagtatctcaaatatcgtccgaagcatagcttcaaagccacggtagatttccagtggaaacgtatcaatctgggtgccaacgttgcctggaagagcaaaatcctcgctgtggactacctgatgatggatgaacgtccgaaaacacaacttgacctgatggattatgttcgtggcgttgctttcggctattccaaaggagaaagtctggcgagctactggaaaaagcacaatacggactatgccaccgttgacatgcgtcttggagtaaaagccacgaaagaggttgctttccagtttatggtaaacaacttgctgaataaggaatatagctatcgcccgatggcagttgccgctccacgtacttttgttgtaaagatggatattacattctaaactttccgcaagagtcggaaatagagaagaaaaaaacgaacggtttctcacctgtgaaaaacaggtgggaaaccgtttgcttttttagagctctcttcattctctttttacagccattcttaaaagaagaacaatcaatattaaaaatagaacacatttattttctcattttaagcactttcgccatacacaattaaaaatagaacattaaaataaaaaacagaccttgacaataaagaattgttagtcgaactttgcaaagttttattaaatacgcaataaaaacaaaaagcaaaatgagaaacctacgaaaactattttatgtagcttgcgcggtatttttctttacatcatgcgaagagacttacaatgacaagctattttggccgggagaaattagtcaggaatatggctcgtatattaaaccatatacgctagacctaacctacagtggagagaaactcgttggaaaaactgtcagtttcaagacaggagatagtgaaacgggaacactgacactgaatgatgtgattcccggagaaaaggaaactcctatcagtcatatccaactgtatgagaatgaagagaaagggtattacactttcagcggaacaaatatcacgatgggaggagctacggtgaaatacagcggtagcattactccgaaaacgatgaagctggatttgaatgtggtaatggctgatccccaaaagctggttaacaaatacgacttcgctctttatgaaatggttcaggatcttacgaatgaatttcatcctgtacagtacaaaggtgcctgttatttcgatatgaaacctaaagaagggataggaactgacgaagcttcattaatgtatctcttaggtaaccttgccccgggtattcttcagacgctcatacctcaattaataaaagatatcaaactggaaaaggatggtactattacagcatattactcttcagatccaataaatgaagagttactgttcttacctttgaatggcgatgaagcagaagttgttcaaaaacaaattcaaaccgttatagaaaaccgtacttatgagaaatctcctaatggactagcttattggggacaagccaataacaagttaatattaaaactaaatattcccgcaatcattacagaaatcattaagaatagccagcaacagatagatggtgagcttatcaacgggattactgaagccattctcaaaacggaccccattcgcctcaaaagtctgctttccactcttaatgcaattgtgaataatgatatattaggttacttggtaatggtggacgatgcctcttttaccgctttattcaattgcatcaaaaatggtattcccatgaatataacccataccaaagatggacatacctatctatacctggactatcagacattaactcctgtcatcaacatactatccggaattaaagtcgatttaggaggactttcattggatttggctatgattgctgaacaatggaaactcatgcaattattcaatttaggattggacttagttccatcgaccaaataattaccaatcactataaaagagaatgataatgaaaaagatttcacttataatatcgcttatattcacgagtgtaacaggaatactgacttcttgtagtgaagattatccaggccccgatcctgtagacgtaacggccaattattccaataaattttcgaatccgaatcctaccttgactttggtatacaacggcgaaaatatgactgggaaatcggtagatttcagcacagtaaagggtgagacagctaatcttactttttatgatattcttccgggagaaaaggcattaaagctgactcatatacctctcacaggagatgcagagggatactcttttcaaggcaaaggcatcggtactaccacccaaagcacctttaattatgagggacgcgtagtgaaaggcagacttatattaaatctggctgacgtaacgatggcaaatgctaatttatgggctaagaactatcgtttcgcagatgtagagcatggaacaggaaaggttattgcagatgagggaaatggatatcaatgggaagaaaaagatgacaagatgacttcatgtgccatttacttcagatttccggaaacagaagaagccacagaaaccagctacaacggtcaaaacatgggaagtgttctgcagggattattaggatacttgttgccttgcatcctgaaagatataacattggaaccggatggaaatatcattgccaattattcgggagatgcttttaacgaggaaaacaaggatttatttatcggtaatgttctgactgcctttttaaatatggatatagaggaccaggatatgattacggatgccattaaagattatcaatatacgacttctcccaaaggattggcatactggtttcaaagggatggcaagattgttataaagctcgatctgccggcaatcatttcacaggttgcttccggcagtggaaaagtgatcgacaaaaacatcataagctccatctcggatgccatcttcagcatggatgccttaaaacttaagagtcttctgaaaacagtaaacggtcaattgcaaaatgagattctaggttttatcgttagcatgaacgatcaatcttttgcaacgttctttgattggttatcaaacggaatacctatgcacatcaagatacaaaatggtcactcatacatttaccttgataaagaaggaatagctccgatattaaagcttcttggagattttcatcccatagtattaaaaatgctgccaagtttattaccaccggaaatggccggacttgccggatttctcgaaccgctaatagatatgctatttatcacttggccggaatgtgcattgctagttcaaagttttgacttgggactcgatctcgtacctcaaaattaatatactattaaagaataagaacaatgaagaaattatatactctgataatccttttatccctaaccggtttcggaagcagctttgcccaaaccttgaaaggacatatatacgacgccagaaccaatgagccattggtaggcgcagccgtcacatacaaactccatggcaatcagggagcagtgtccaacatcaatggagaatatgaaatcaaactgcccgagggaggagtcgatcttgtattcagttatgtaggctatgaagatgtattgatgccaattgttatcaataagcgtgaagtcatcacgaaagacgtttatatgaaagaaagcacaaagctactggaagaagtggtggttagtgccggacgctttgaacagaagttgagtgacgttactgtttccatggatgtggtgaaagccggagatattgcccgtcaggcaccgacagatatttcttccacactccgtacattgcccggtgtagacattgtagacaaacagccctctatgcgcggtggcagcggatggacttacggtgtaggtgcacgcagccagattctgatagacggcatgagtaccctgaatccaaaaaccggtgaaatcaattggaacaccatacctttggaaaatgtagaacaggtggaagttattaaaggagcttcctccgtgttgtacgggtcatcagccttgaacggcattatcaacatccgtactgcacgtccgggactgactccgaaaacacgtttcagtgcttatgtgggagtatatggtgatgcggaaaacgacgaataccaatggagcgacaagagtttctggaaagatgataaatattctgttaaaccgatcctgcgcggaagtcttcttagcggtatacggaatcctatttacgaaggattcgacctctcccactcccgtcgtatcggcaatttcgatgtcagcggaggaatcaatcttttcactgacgaaggataccgccaacagggatacaacaaacgtttccgtatgggagggagcctcacttatcatcagcctgatatgggaatgaaactgttgaattatggtttcaatgtcgatttcctttccaatcaatatggtgacttctttatctggcgttcaccaacggaagtgtacaaaccgtctcctttcaccaacatgggacgtgaagagaataatttccatatcgatccgttcatcaactatgtgaatccggaaaacggtacgtcacataagattaaaggacgtttctattacagtgccgataatatcgtacgccctacccaaggaacttccatcactgatattctgggaaatatgggaactgatgccaaaacgatacagaatatagccggtggcgattacagttcactttatcctgcattggtaggtataggttccggacttgtcaacggcaacctggaagatgccatgaacggagtgttcacctcattaggcaatattttcccgaatgcgacgactgccgattattgcgatctgatctcttgggtaatggacaacggagtgccgagtgacttagggggacttacgaacggacagttaccgagtgatctgattccgtggttatcaaatgttatcaatccgtcacgaaacactccaaaaacacagactgataagaacttcgattactacctcgactaccagttcaataagaaatgggaaggcggtgcacaaatcactaccggagtaaccctggaacatatccgctatgactccgctgtaatggatgaggtatacaaaagtgataatatagctgctttcttccaatacgatcagcgcttctgggatcgtttgagtgtatctgccggtgtacgtgccgaatattatcgggtgaataatcatcaccgtgaagccgaaactaaaatcttcggaaccaaagttccgttccgtccggtcttccgtgcagggttaaattatcagttggctgattacagttttatccgtgccagcttcggacagggttaccgtaatccgtctatcaatgaaaaatacctgcgcaaggatattggtggagttggcgtttatcctaatctggacatcaaaccggagaaaggatttaatgcggaattaggaattaagcaaggatataaagttggtaatttccagggttttgtggatgttgcaggattctatacacaatataaagacatggttgaattccagttcgggctgttcaacaatgccaattacacgatgattaatagcataggcgatgcattccagatgctgacagatggcaaagggttcggtatcggagcccagttccacaatgtatcgaaagcccagatttacggagtagaaatctcaacgaacggcgtgtataatttcaataagaacacgaagttgttctataacttgggatatgtatacacggagccatgcgatgctgactatcaggaacgtaatgcagtagaggggctttataccgatcctcttcagatgaaagagaaatcgaacacaggtaagtaccttaaatatcgcccgaagcacagttttaaagctacggtagatttccagtggaaacgtatcaatgtcggtgccaatgtagcatggaagagcaaaattctggcagttgactatctgatgttggacgaacgcgagaaacagcagaaagacctgatggattatgtacgtggcatccttttcggttattcaaaaggagagacactggctacttactggaaaaaacataatacggactatgccactgttgacgtgcgcttcggagtaaaagccacaaaagaagtagctttccagtttatggtgaataacctgttgaataaagaatacagctaccgcccaatggcagttgctgctccacgtactttcgtactgaaaatggacgtcactttctaactaactttcaagattcacaattacttaagaaacggctgctcaatgcagccgttttcttttttctcctcatctgtcatcatttatctatatattgcgtatctttaccccccgaaaacgagaagaaataaccgataaaatgaaaaaacaaatcctacttattgccatcctgttttgtacggcctttgcacaggcacaagaagtttttgtaactgctgattttgtaagcagttatatttggcgcggtatggatagcggcaatgcaagtgtgcagccttcactcggcctcaactggaaaggactgaccgtttacgcatggggttctaccgaatttcgcgaaaagaacaatgaaatagatttatcactagagtacgaatacaaaaacctgactctttacgccaataactattttacccagacagaagaggaaccttttaaatacttcaattacagttcgcactctaccgggcacactttcgaggtaggagccggctatatgcttagcgaaaagttcccattgtcagtaagctggtacactacctttgccggaaacgattaccgggaaaacgggaaacgtgcctggtccagttactgcgagttgagttacccgttcagcgtgaaggatgtaaatatgaatatcgaagcaggtttcactccttgggaaagtatgtactccgacaaattcaatgtagtcaatatcggattatctgcaacaaaagatattaaaataacgtccaatttctctttacccatcttcggaaagctaatagccaacccttatgaagagcaactttattttgtagttggaattacattgtagatgattcttacattcaattattaactaataaacacccccatgaaaaaacactttcttatctttgcaacaggtctttttctactaagtgcctgtaattcggtaaaagcaccggaagctatcttacccattcccgaagccaaacaggtggaatggcaaaaaatggaaacgtatgcatttgtacacttcggacttaacacattcaacgaccgtgaatggggatatggagactccgatcctaaaacattcaaccctacccgtctggactgtgagcaatgggtacagacatttgtcaaatccggcatgaaaggagtgatcctgacagcgaaacatcacgatggattctgtctgtggcctacgcaactgacagagtactgtatccgcaacactccgtacaaagacggaaaaggagacattgtccgcgaactatcggatgcctgcaaaaagtatggcattaaattcgcagtctatctctcgccctgggacaggcatcaggccaattatggttctcccgaatatgtagaatacttctataaacaactcaacgaactgctgaccaactacggtgacgtatttgaaatctggtttgatggtgccaacggtggagacggctggtatggcggagcaaaagacagccgtacaatcgaccgcaagacttattataactatccacgagcttacaagatgattgatgagttacagccacaagctgttatcttctcggatggaggtccgggctgtcgttgggtaggcaacgaacacggatttgccggagctactaactggtcttttcttcgtgcaggagaagtttatccgggctatcccaagtatcgtgaactgcaatatggtcatgccgatggtaaccaatgggtagctgccgagtgtgatgtttccatccgtccgggatggttttatcatccggaagaagacgaccgtgtgaaaacagtagacgaactgactgatttatattaccgcagcgtaggacataacgcaacgctattattaaacttcccggtagaccgtgacggattgattcaccctactgactctgtcaatgccgtaaacttccaccagaatgtacaaaaacaactggcacacaatctgctggcgggactctctcccaaagcatcggacgaacgtggaagaacattctccgccaaagctgtgaccgacggtgattatgatacttattgggctaccaatgatgatgtcacttcagccactatcgaattcgatttacctcaggcagaaaagatcaaccgtatgatgttgcaggaatatattcctctcggacaacgtgtcaaatcattcgttgtagaatataaccaggcaggcgaatggctcccagtaaagctcaatgaggagactaccactatcggatataaacggctccttcgtttcgaaacaatcactacggataagattcgtgtccgcttcacggattcacgggcttgtctctgtattaataacattgaagcatattatgcaggagagacttcggatacatacacagcgaaagctgcagaactgaaaagttacccgttcactcttgttggagtagatgtagaggaagcacagaaaggcatggataaaaacgaccagaccacctgtttcatcaatggaaatacactattgattgacttgggagaagaacgcacgattacctcattccactatctccccgaccaaagtgaatataataaagggttgatcgcggcctacgaaatatctgtaggtacggacagtaatgcggtcaaccaggtagtagccaaagatgaattttccaatataaagagcaatccgattttgcaatcggtttactttactccggtcaaggctcgctacattcagttgaaagcaacacggatgatacatgacggtgaaccgatggggttagctgaaattgggatacaataatagatgatatggtacaaaaaacaggaattattgtgcagaagaaaaactatactctccgtacctggcaaaccgaagatgtagcatcattagcccaatatctcaataacaagaatatttgggataactgtcgtgacggtctcccctatccttatagtcaggaagatgctaacgtttttctctctatggtacaagcgaaagaaaacattcaagatttctgcattgaggtaaacggagaagcagtcggaagtatcggttttgtacccgctacggatgtagaacgttttagtacagaagtaggctactggattggagaacctttctggaaccagggaatcgttactgacgccctgaaagaagccatcaactattatttcgaacacactgataaggtacgtgtattcgcagtcgtatttgagcataactccccatccatgcgggtattagagaaagtgggattcacgaaagtaggaattatgcaaaaggctattttcaagaatgataatttcacgaatgcacattattacgaacttatcaaataatccggaattcatcaacagtctgccggacaatccggcagactgcccataaacgctttgtcaaccctgaattaaatctataaaaaccctcctcttttgctcaaaaatcttaaacctgtgcattttttactcggatttcttgtcagaaccaagcgtttgagtaaatttgcacgctgatagttaaccggatagtttggatagcaagatattactacttgactactggctgctaacttgtagaaatactaatactaaaatttatagcatgagtttgaaaattgttgtattggcaaaacaagttcctgacacacgtaatgttgggaaagatgccatgaaagccgacgggacgattaaccgcgcggcacttcccgctatcttcaaccccgaagacctgaatgctctcgagcaagctcttcgactgaaagatgctcatccaggctctaccgtaaccatcctgaccatgggaccgggacgggcagccgacattattcgtgaaggacttttccgtggcgcagataacggttacttgctgaccgaccgtgctttcgctggtgcagatacactggctacgtcttacgcactggctactgccatccgcaaaatcggtgattgcgacattatcattggtggtcgtcaggctatcgacggtgacacggcgcaagtaggtccgcaggtagcagagaagctaggattgacgcaaatcacatacgcagaagaaattctggaagtgggcgatggtaaaatcaaggtgaaacgtcatatcgacggtggtgtagaaactgtagagggtccgctgcctatcgtgattaccgtaaacggttctgccgctccttgccgtccgcgcaatgcgaaactggttcagaaatacaaacacgccaaaacagttaccgaaaaacaacaaggtaaccttgattataccgatttgtatgacaagcgtgattatttgaatctggtagaatggagtgtagccgacgtaaacggtgaccttgcacaatgcggtctgtccggttcgccgacaaaagtgaaagccatccagaacatcgtgttccaggctaaagagagcaaaaccatcagcggtagcgaccgtgacgtggaagacctgattgttgaactattagctaaccacaccatcggataatcatgaataacttatttgtatattgcgaaatagaagaaggtaacgttgcagacgttagcctcgaacttctgaccaaaggtcgttcgttagccaaccagttgaactgtcagctcgaagctgtagttgccggaagcggcctcaaagatattgaaaaacaaatccttccttacggagtagataaacttcacgttttcgacggtgaaggcctttacccttatacatcacttcctcacacagctatcctggtgaacctcttcaaagaagagcaaccgcaaatctgtttgatgggtgctaccgttatcggtcgtgacctcggtccgcgcgtctcttctgctctgaccagcggattgactgccgactgtacttcacttgaaatcggtgaccacgaagacaaaaaagaaggtaagacttataagaacctgttatatcaaatccgtccggcattcggtggtaacatcgttgctacgattgtgaacccggaacaccgcccgcagatggcaaccgttcgcgaaggtgtgatgaagaaagaaatcctctctccgacttatcagggagaagtaatccgtcacgacgtgaaaaagtatgtagccgacacggactatgtagtgaaagtcatcgaacgccatgtagaaaaggcaaagaacaacctgaaaggttctccgatcatcatagccggtggttacggtgtaggttcgaaagaaaacttcaacctattgttcgacctcgctaaagaacttcacgcagaagtaggtgccagccgtgctgctgttgacgctggtttcgcagaccatgatcgtcagatcggtcagactggtgttacggttcgtccaaaactctacatcgcttgcggtatctccggacagattcagcatatcgccggtatgcaggaaagtggtatcatcatctccattaacaacgatccggatgctccgatcaatacgattgccgattacgtaatcaacggaagtatcgaagaagttgtgccgaagatgattaagtattataaacaaaatagcaagtaaggaaagatggctaattattatacagacataccggaactcaagtttcacttgaacaatccgatgatgaaacgtatttgcgaactcaaagaacgcaattacagagataaagatgaattcgactacgctccgctggacttcgaagatgctgtagactcttacgacaaagtattggagattacaggagaaatcacaggagaaatcattgctgctaacgcagaaggtgtagacgaagaaggtcctcactgtgctaacggtcgcgtagaatatgcttccggaaccaaacagaacctggacgctatggtgaaagccggcctgaacggtatgaccatgccacgcagattcggcggtttgaacttcccgatcactccgtacaccatgtgtgcagaaatcgtggctgctgccgacgccggtttcggaaatatctggtctttgcaggactgtattgaaacactgtacgaattcggtaacgctgaccaacacagccgtttcattcctcgcgtatgccaaggtgaaacgatgtctatggacttgaccgaaccggatgcaggttccgacttacaggcagttatgctgaaagcaacttatagcgaaaaagacggttgctggttgctgaacggtgtaaaacgttttattacaaacggtgatgctaatcttcacttggtattggctcgttcggaagaaggtacaagagacggtcgtggtctttctatgttcatctatgacaagaatgagggtggtgtgaacgtacgtcgtatcgaaaacaaactcggtatccacggttctcctacttgcgaactggtgtacaagaatgctaaagctgaactttgcggtgaccgcaaactcggtttgattaaatacgttatggctttaatgaacggtgcccgtctgggtattgctgcgcagtccgtaggattgagccaagctgcttacaatgagggattggcttatgctaaagaccgtaagcaattcggtaaagcaatcatcgaattcccggcagtatacgatatgctggctatcatgaaaggtaagttggatgccggacgtgctttgctgtatcaaacagctcgctacgtagacatttacaaagcattggatgatatttcccgcgaacgtaaactgactccggaagaacgtcaggaacagaaaaaatacgccaaactagcagacagctttactccgctggctaagggtatgaactctgaatatgctaaccagaacgcttatgactgtatccagattcacggtggttcaggattcatgatggaatatgcttgccaacgcatctatcgcgacgcacgtatcaccagcatctacgaaggaactacccagttgcagactgtagccgctatccgttacgtgactaatggttcttacatcgctactatccgcgagtttgaggccattccttgttcaccggaaatggaaccgctgatgtctcgcctgaagaagatggctgacaaatttgaagcaagtaccaacgctgtgaaagaagtacaggatcaggaattgcttgacttcaccgctcgcaaactggtggaaatggctgctgatattatcatgtgtcacttactgattcaagatgccagcaagtcttctgaactgttctccaaatctgcacacgtatatttgaactatgcagaagcggaagtagaaaagcatacaaatttcatcgaaaacttcgacaaagaagatttggcgttctacaaaaagtaacaaataatcgactaaatctgataaaagcatcctttcttacgaaatggatgctttttttatttgtcatattctattattttccattattattctatacatttgtcagtgagataagtaattttttaattgatgaatgtagatagagatagaaatatggcactcaaaccttcatataatgacaaactgtatttgccaggtttatcaaacacggaaatccttatattggctctcgaagcctctcaaaaacttgagtggaatatcgaggaagtaactccggaaggaatccggtttgaagtcccgttcagtatacgctcccatggagaggcaataacctttaccatagaaaagggaagtgacggggaagtatccgttcgcagtcagtcttcttccgtacaatttgttgattatggaaagaacagaaaaaatatccagaagttacgggaaacaatggaagaaataaaagcctcactcactccggaagaactagcccaaagggccaaagatttcgaagaagagttcaaccgcccgctcacagaagaagaaaaagcctacatagaggaagaaaagaagaggaactctttcctgtctttcttcattccctgcaaaggatttatagcaactcccatcctgatagacatcaatattcttgtattcattgtaatgattgcttccggagtgggtattatgtctccttccactctgtcactactgaaatggggagccgacttcggaccgctgactctcaccggtgactggtggcgcacagtgacttgcaacttcatacatatcggagctttccatctcctgatgaacatgtatgctttcatgtatgtaggacttctgttggaagaactgataggaggacgccgtatgttcgtttcatacctgctaaccggattatgttcggctgcattcagcctgtatatgcacggtgagacaatcagcgccggagcttccggatctatcttcggactttacggtatattccttgcattcctcctctttcatcgcatcgccaaagaacaacgaaaggcattgttaaccagcatcctcatttttgtggggtataatctggtttacgggatgaaagccggcattgataatgccgcccatattggcgggttgttaagcgggtttgttctgggaattatatacgtggtcggctacaagttcgagaaacccgatgcacagcggactgtctccatcatcggggagcttggtatattctgtatattcctgttcagcttcatgatcctgtgcaaaaacgttcctcctctttacccggagatacgcaatgaatgggaaagcggcattgtggaagcctatctgaatggtgaactggaagaggaaaacgagaacagtaatcattccgctgtgaatgctacggacaatctttccagcaggaaagttccggcatatacgcctgtcggcaatgacgatacgtggctatcttattatgatgcagccaccaaattcagttgccagtatcctaccaactggataaaaatagcaggagcaaaaggaattattgatagtgcggaacctccattactcatgctggtcaacggagggaatcaattaacgattaccgccctcacctacgacacgcagaaggagtttgaacacatgaaagagttatcactcactctcccaagaaatgcacaaggggaaccgtcagaagattaccaactaagcaatgtcaacatcaacggactccccatgacaaagatcacgaatcccctgcacatcggggctcctgatgaaccgggagaggatgtaaaacaaatagcgttgcattactttcaagagagcaagaaacgatcttttgctattgtcatgcttgtctatgacgaagaagctgaaaccgatctgaatgccattacatcaagtatccagatcacccaataaagagaatatgagagtatatatccaaatcaaacagttaggaaagcgaaagtgcagtatcgaaaagattcctatcgattttcctgttccgcctgtcaatgtacaggggttgatcgaagccatcgtcagttggcaagtctgcgaatacaatgaacgcttgcaacagagcgaagtgctgaaatacctcacacaggaagaagtggaaaataaaacagcttccggcaaagtagggtttgcagtaaactataatggcaaacctgccgcagaagtcgaagccatcaccaatgctttgcaatcctatgaggacggaattttccgtatcttcatggatgatacggaaaccggagacctatcctctcccatccaacttaaagaagaatctaccttaaccttcatccggctcgctatgctgtcgggaagattatggtaatcattatcctataaaacacatttaaaacgaaaagaatcatgagactgatttacaatgacgcattaaataaacggattgctccgtacctggaaaggttaacgaaaaagagaaccagtttagacaaagagacaatggcactgttggatgtatttatgcaatacttcaacatggatacccggtatggtgcatacagcgataaattagagccttgcatcatctatattatccaagaagagaagattaaaagcgttgccaatcttttcgatggtaaattgaacaagctactccgctatctattgggagacgagtacgcccacctgttccacacctatctgaagctcaaagcacggtgcccgtacactcacggatactcgcgccggtcacaacggtcggcaaatcctcttctgcatatcggccacgttatagatgcactgacccagtttctgaaactgcgcgccaccggatttacggttcaagccatactgaacggaggaaacactccggaagaaatagaagcatacaaggattcgatgaactgccaaaactggatggccgcccaaatagcagaaggcaaccagactgtcattgaatacctcaacaatgtgctgaccagtgagaataacgccaaccgcctcaaccagggacatctccaggctatcgcagtaagtggataccgccccttgctggaactggaagggaagttacttctggcagccaagttacaggagggtctccgccaagctatcgtggaaacgatggacgaaggttgtcccgaaagttatctccatcttttctcggtcatctgcgacaacggcctgcaacgatttgcttccgtgaaacgcggtattgcagtcagtacgggtatcggagaacaagacagcagcgaacgtatcaccaataaatatgtagaactgatccatcgttttctgaacgaccggaaacaagcacacagtgctcttcaaagcaaagatacagtcgaactctatctggctttatggagcatcggattctataatacggaagagattcagacgctcgtaccggaaattatcaagaaaggtgctaaataccaggtacagacattactttatttcttacgctgtacgcaatactccggcatgaaccaccgcatcagtaaaaatgcctttgaaagatggtataaggaaccatcggtggtggcggctatcttaccgttgtatctgtccggtctctatcttagccggtatggagggcacaaagacgccccgtcactccacgactattttgatagcaaagaagaggcggtccgccattatgaatatctgaagcaaatctatcagtccatctctgccaaagagatttattctccttatgtattcccttgggaaagcacagaactcacccgttcggaaatcgttctcaaaatggcatatatcacctggatgaccaataattctgtattgaaagacgatctttgcagctatctgccctctctggatacttatatgcgggcaggctatatcagtgttgtattagctccaccgaccagtccgctacaggaagaatatgtactgcaatcactgggagaccgttcgcaagatgtgcgtgaagaagcatataaagcattgtccgagatgaccttatcgcccgaacaaaaccagaaagtagaagagttactgcgcttcaaatacagcgaaatgcgtatccatgctatcaatctgctgatgaaacagcccaaagaacagctagccgacagcatccgccgcttgctaacagacaaggttgccgaacgccgcctggcaggattggacatgatgaagaccatacacaatgtagaattcctgcaagatatctatcaggaattgatcccgacagtcaaagagattcagaagccgaacccgaaagaaaaagtattgatagaatctctgattggcgatggaacagaagagagcgtcacacaacattataccaaagataacggtttcggtctgtacgatccgtctcttgaagtcagtctgccggaaattacccaggacaaaggattcaacgttaaaaaagcattcgaattcatctgctttggaagggccaaactcgttttcaaaaaactaagcaaatacatcgaaacctacaagaatgaagaattcaaaaatggttacggagaagcacgtctggtaggtaacagtgtcctgataaactggagcaactacggaggattgagcggactcggattcccggaattgtggaaagccttctacgaagaagaaataggaagctacgacaaattgctgatgatgagtttcatgcttgcatcgacaggtaccgctaaagacgaagacgactccgacgaggaagatgaagaagacatcaaggcagaccagaaatcaagtaatacttttgagccgcttgtcaaccggatgtatgccggcatcacttaccgcggattgcagaaagacctccgcaagatgccgtactatgaacagatgagtgacatcatcgaagcactggcatacgaatacaaagatgaagccgtctatcaacgcctggccgtcaatatgctgctccaactattgcctttgctaaataccaaaaacatcttccgccagtacaccagtaagcatgcatggcttcgggacaaactggaatacggagaaaaacaggtcgtttatccgatacataacaacaaattcgtgaacttctggctcgaaatgcctcaaaagcccatgaatgatgatctatttatccgttacttcacagtgcgctatcagctttataagctcaccaactacatggagcacacccccgaactagaggaaacagactcttatcttcatgccacagacttcgcccgtgcctggatgctgggaatcatcccgacagaggaagtataccgtgaaatgatgggacgcatcagctctcccagccagatcaaagcaatcaccatggtattgaacgacaacgttcgtttcaacaaggaaaaagaaagatacgccgatatcaaaaacatcgacttctccctcttccgttccctcgcccaaaaggtggtagaccggattcttgaaattgaattaaaacgtggagactccgagacacaagtcacctcccttgcagaagaactaagctacgtctatggagctgaaacatttatccgtattctgcaagcattcggcaaagatactttcatacgtgacagttacaactggggcagcaccaaacggggtgtattgagcagtctgctccatgcttgtcatcccctgcctacggacaccagcgagaatctgaagaaactggcgaaacaagccgaaatcagcgacgagcgactggtagaagccgccatgttcgccccacaatggattgaactgactgaaaaggcaataggctggaaaggactgacaagtgcagcctattatttccacgcccacaccaatgaaacgtgtgacgacaagaagaaagcgattatcgcccgctacacccccatcgacgtagatgacctgcgggaaggtgcttttgacatcgactggttcaaagatgcatttaagacaattggcaagcaacgcttcgaagtggtctacaatgccgccaaatatatttcatgcagcaacagccatacccgtgcccgtaagtttgccgatgctaccaacggtgcagtgaaggcggcagatataaagaaagaaataatagccaagcgcaacaaagacttattgatgagctacggcctcatcccattgggacggaagccggataaagaactgctggatcgttatcaatacctgcaaaagttcctgaaagagagcaaggaattcggtgctcaaagacaggaaagcgaaaagaaagcggtaaacatcgctctgcaaaacctggcacgcaactccggttacggagacgttacccgcctgacctggagcatggaaaccgaactgattaaagaacttcttccctacctgtcccccaaagagatagacggcgtagaagtgtatgtacaaatcaacgaggaaggtaaatcggagattaagcaaatcaaagacggcaaagagctcaacagcatgcctgccaagctgaaaaagcatccgtatatagaagaactgaaagcagtacacaaaaagctgaaagaccagtacacccgttcgcgcatcatgctggaacaggcgatggaagactgcacccattttgaagaaaacgaattgcgcaagctgatgcagaatcctgttatctggccattactgaaacatctcgtcttcatctgcaacggacagacgggcttctacaccgatggattgctgattacagtgaatgccgtttgcctcccgttaaaaccgaaagacgagttacgcatcgcgcaccccacagacctgtatacaagcggagactggcatgcttatcaaaaattcctgttcgataaatcaatccgccaacctttcaaacaggtattccgcgaactttacgttccgactccggaagaaatagaagccactcaatcccgccgctatgccggcaaccagatccaaccgcagaaaacggttgccgtactgaaaggccgtcgctgggtagccgactatgaagacggtctccaaaagatctattacaaagagaacatcatcgccaccatctatgcgatggcagactggttctctcctgccgacatcgaagctccgacattagaatatgtctgcttccacaaccgcaaggactacaagctgatgaaaatctcggagattcctcctgtcatcttctcggaagtgatgagggacgtagacttggcagtaagtgtagctcatgccggaagcgtcgatccggaaaccagccactctaccatcgagatgcgcagcgtgctggtggaactgacaatgccgttgttccatttcaagaacgtgacgataaaaggaagtttcgctcacattgaaggcaaactgggtaagtataatatccatctgggcagcggtgtgatccatcaggaaggtggtgcacagatagccgttcttccggtacattcgcaaaatcgcggacgcctgttcctgcctttcgtagatgaagatccgaagactgccgagatactgactaagattatcttctttgcagaagacgataagataaaagatccgagcattctgaaccaaatcaaatagtaaagagatggcagaaaatttaatcatccacacaggaagcaaggaagaaaagtatcgggagttacttccgcaactgcatgctttggtaagtacggaagcagatctcattgccaatcttgccaacatggtagcagccttaaagcagactttcggtttcttctgggtaggcttttaccttgtgaaagaagaagaactcgtactgggtccgtttcaaggccccattgcctgcactcgcatccgctttggcagaggagtttgcggaaccgcttggaaagaagcccgtacactgattgttcctgatgtagagcagtttcccggacacatagcctgtagttcggactcgaaatcggaaatagtagtaccaatcctcaagcaggggaaagttgtcggggtgctggatatcgacagtgatacattggatagcttcgacactatcgacgcacgctatctggaagagatttgcacgtatattgtattataaaataacggcataaacatcctgaaaaaacggaggctctgattgaatgaatcagagcctccgtttactataaatagagcctctgttcgaatcaaacagaggctctatttttttaccagtccatatcttctatttcccgttcccggtacagcaaaagttgtttgcgaagcgaacgcatttcgtgcctcatatcttccatcctttccagcaaatgatgaatggcatcgataccttccatgttgatggataagtcatagtacattctgctataacgttccacgttcgggagttccgacaaaagcagataatgttcaccgccttcggtatgcacgttaatcaaaccgccctcttccaacatttcgatgaatgaaggctcaatatgacatttgtgacagtattcactgacaattattaattcggtctgcatagtactcattcattttagttcatactctgtaattgacggaacaactctttctgtttgtcggtcaagttcgtaggaatcttgacagaataggtcacaatcaagtcaccgaattgtccttccttcttataaaccgggaatcctttacctttcagacggactttcgtaccgttctgcgtttccggttttatcttcagtttcactttaccgtccagcgtgtcgactactttctcgcctcccaatacggcagagtaaagatctacctccacatctatgtacagatcgtcgcccaggcgtttgaacaccgggtcttcggctataacgaacgtaatgtacaagtcccccgcaggtcctccgttgacaccttcggctccgtagcctttcagtttaataacctgtccgtcggctacaccggcagggatagtgatacgtacctgtttaccatttacagtcaatatctgcttatgcgtttgagcagcatcacgaagggaaagatgaagttcggcattaaagtcctgtccgcggaatcccgcagaaccttgtcctcttcctccccgatgtccgaacattgattcgaagaaatcggaaaatccactagcgttgccaccggaaaatccttctccatcggaactataccaataggttccgttaccgtcggagaaaccctgacccgcaccgccgaatccgccgaaacctcctgcaccgccaaagcctccggcttgttgctgtgcacgtttctgcgcttcgaattcatcggcatgcttccaatgttctccgtactcatcatactttttacgtttctcggggtcactcagtacttcattggcttcgttgatttcctgaaatttatcctttgcactagggtcattaggattcaaatcagggtgatatttccgggccaacttacgaaaagcctttttgatatcatcctgagaagcacttttgtctactccaagaatcttgtaataatctatataggccatgttttatgaatttaatcgttcatacatcatacggcaaataacacgccaatcccatttttggatgcaaaaattaacaaggattaatacctaatacttaatacttgatattcctcttttccagcatctggaagtcttgcttcttcatgcccaaatcatccaacggacggggatcattgtgatcgttcagataaaccctcggtttcaggacgtagtgcgaagccgtcacagcctgcgaatcatcccggtaaggagtttctattccgcctaaagacagcatggtcgggaagaaagagctgctggaagaaacattcttatccttattttcaatagcggtattccaacgttcgggatacgtttcgcggtagtcatcggacatccaaatcaggaatggcacatgaagctgataataagaaggtacgggagaagcgtggaggaacagatgacgggaatcgtcgaaaatgtcctctccatgatcggaagtgtagagcatggcggcatctacctgctgtttttccaacatacggataagtcgtgacagaaaatcatccgtgtaacgaatagagttgtcataggcattcaccaggttatcccggtattttctctctgcttccatcggataatcgggcgtaaagaaagcatcttccgacgggtaacgttcgcgatagttaaagtgggaaccgtaggtgtgaagtacgatgaattgtttcgttgcacctttcgccagttcctcctccaccaatttcagaagttcgtcgtcagaaggattataggtagaactgaccgaatcttcttttataaaatcatacgtatcggcttccattccgaagaagtcgataaatgaatgattgtaacgttggttggagaaaaaagccgtccggaatcctgcctctttgaaagcggtgatgattcctttttgatggtagatagagtcgtagttgcaggcagtagcatccgacatcagcatggggacacttttatgtgtcgtattcgactctgtcaacacttttgggaaagcaatcagccccgtttgccgggataagagcgggttcgtttcacgttcgtaaccatacaattgccagtttagggcacgagaggtttctcctatgaccattacatatacttcccgttttccctccggatgagtaggccgggcatggaaagtaaagtctttggatgtacggtggtaatcctgtgtcagagctgttctttgaaaggcaagacctacgttgtagcatacgtttagcgggtataaatcagatttcaactcatatcccgaatcctgcacataggctccgacaagactaaggagggagattccaaagaccaggaaggctctcttccgttccctgcgaatgaactctaccgtaagtttccgtttacgtataattgaaatcgtccctaatatcagggcaggtacatagagtatgattacagcaataatggcaggtgtgagattatcgagcagttccaatgcctcactcgaattggtggtgaccagattcaaaaacatatcgacagcgataatggactggccgaataaataaagcaacacgatctgaaaggctccgaagaacaggaacaggaataaaatccacagcatcttgccgcaattcctcgacaaagtcatcaacaggtaatagcaaccgaaaggtaacaacacattggcgacttttgccataaatggtaaaggttctgtaaaacagagtaccatattaggtactatcaagataaacaggaacagataaaacagatgttcctgattttccaaccaattctttatatttttaaaaagcttcattgatgttaaaaataaatccggtctggtgtttgccaaaccctaaatccaaacgtacatttactctcttcttaaattcccaacgatacccgaagccataattaggcagaatgtgtttcggggtgaactcggaaagtcgtggaaaaatcgttcccgctcctacccatacagctactccattccgtttccagacgtgttgccggagttctatttgcgcgtccattgctcccttgtcccgatagcgtccttcgtaatatccgcgcatggagtaagaacttcccaatgttgccatcaatccccaaggggtatcgccataggtaagcaatgtgtggaattgccctgccagcactccacctttccataccggctgataataactggtagtcagttctgtactgctaaacgcatatttattgccgagaaaagccggactgaaccgctggtctatccgcaaataatagccatgatatgcatttgtcaggaaatcacgtgaatcgtaaaggagggaaagtcccaggctggtattagtggttcgcgcggccattccttcccatagttccggtttctcaaagttccgtccgtcgatataatcgaatacggccatcgggccgatgtagaagttctttgccagccgaaacataaaatcgactttcacctgtgcctgaaaacgtttataatcgctttcgttatcagagttcgctccattgtcatatccccgtccccaatacagactgggaaaagaatagaaatagagattgtaattcaagcggtatttatcttttggaaacagatgatttccgcggactcccaacagatagaagccgacagtcgacacatctccgtaaagagagacattggagggaggaagaagcgtatcaatccgatcggttcgatatagtccggctgccaccagtccgagtccgaacttggtgtcactggaataatgtgggccgcctatcacactgaaatcaaactttttattctttttttccttattggcgtcattgaagtaatcaagaaactttttaaagaaactgcgctttgccggaatggaatcttccatggttgcagatatagaatcctccggcagttcaattttagtagaatgcagctgtgcgcccaacggggtttgtgtcaacaacaaaagcgcgaatatgattagcctgttctgtctagtattcataatcataagaagtagaaaactttgcggacaaagttagtttcaaacttcctataaaaacagatattcaggcgcttttgttgttccggatttcctttttaacgttttaaaagtcttataaactcgtctacatcttcttctgtcgtatcaaaagaagttaccagacggatttcattcctctcttcgttccagaaataaaagaaataagactccagcatgcggtcgataaccgggcggggcatggtgaggaataactggttactttcggctttttgagtgaaagttacttcgggcagtttcttcaattcagtgtaaagtttggcagccattgcattggcatggttggcattcttcagccagaggttatctgtgaggtatgccgtaaactggcaagagaggtaacgcatcttcgaagcgagctgggcggattgcttacggatgaagcgggcttccggttgcaggtctttattaaatacaatcacgcactctcccatcatcagtccgttcttcgttccgccaaaactaagaatatcgactccgcagtctactgtcagttcctttaaggaaagattcaaagcggcacaggcattggctattctggctccgtccatgtgtacatacataccattcagatgggcaaagtcagtcagacgttttaactcttcgagagtatagatggtgccaagttcggtacattgggagatgtagagggctctgggttgtgaatggtgctgatcgccgaaaccatgcagataaggttgcatcaattccggggtaagtttaccgtcaggagtggcaatcgggtgaatctgacaacctgtcattttcacaggagagccgcattcatctacatagatatgagccgtttccgcacaaaagatggaatgatacggacgggtcatcagctgcaatgctaccacgttgctacctgttccgttaaatacaaacaaggggacacagttgggcgtaaaggtttcctttattttcgctacggcttcttctgtccatttatcatcgccatatcctaaagaatggtctatattagcccggttcaatgcttccattaccaacggatgcacaccggaattattgtcggaggcaaaacttctcattgtttcttacattttaattcgtgatgcaaagtaacagaattatttccggaaatccattgaaaggaagaaacataaagcagaaaaaggataaaaaaacaagaatctccgaagtgctgactatgctgtcattcctctggagattcttctgttctcgttaaagcgtcaaactctttcagccaatataaacattcacacagagatatacataaagctcttcatcgcactgatcgaactctattttgctctctcttgacaaccaccccaaagcggcacccagctctttatctttcagcccggattttctcttcaaaagtccatagctccacttctcattattactaagcagttgccaaaccttaccggcattcacaccgatttcatttctgttcatttttctagagtaattaagaggtttaatacattaggttaagatttcgcctataaagataacaaaaggatattgcaattgtttatacatctttactaaaaagttgttacagaattaattttaacataaaagtggtgatgtgtcccgacacaaaggcgttattagcatatgttaaatcagaacttttctttgcagccatctgttattacataaaaatcaatcctaaaccaattacagctatggcaaaaaaaatagcagaacagttgatagatactctggtaaaatccggagttgaacgcatctacgccgtaacaggcgacagtctgaatgaagtaaacgaagcagtcagaaaaaacgatcaaataaaatggatacatgtgcgccacgaagaaacaggggcgtatgccgctgcggcagaagcacaactgaccggtcgcccgggatgctgcgcgggaagtagcgggccgggacatgttcatctgattaacggcttgtatgacgcacaccggtccggcgcaccggtaatcgccatcgcctctacaattcccaccggagagttcggtacggaatattttcaggagacgaataccatcaaactttttaacgattgcagttattataatgaagtagccactactcccacacaatttccacgtatgctccagtcggccatacaaacggctgtcacccgcaaaggggtgtccgttatcgggcttccgggtgacttggcaaaggcttctgccgttgctgtcgactcgtcggttatcaactatcctgccccaccggaagtttgtccgtcggaagaagatctggctcaattagctgacatgttaaacaaacatacgcgtatcactcttttctgcggcatcggttgccggggagctcacgaggaagtgattgctctttccgagaagctgaatgctccggtggtatatactttcaaaggaaagatggaggtgcaatatgaaaatccgtatgaagtgggtatgaccggattgttgggaatgccgtcgggctattacagtatgcatgaagccgaagtgcttctcatgctcggcaccgactttccttattccgctttcctgccggatgacatcaagatagcacagattgatataaagcccgaacgtctgggacgtcgtgcaaaggtggatatcggactttgcggtgatgttaaactgagcatccaaagtctattgcgtatgctgaatccgaagacagatgattcgttcctgttgaaacaactcaaaagatatgaaggcgtaaagaaggatctggctgcttacacggaagataaaggcgacgtaaataagattcatcccgaatatgtgatgtccgaaatagacaaactaagttcggacgatgctgtgttcacagtagatacgggaatgacttgtgtgtggggagcacgttatctgcaagcgacaggcaaacgccacatgctgggttctttcaatcatggttctatggcaaatgctttgccgcaagccatcggtgccgcactagcttatccggatcgccaggtagtggcgctttgcggagatggtggcttgtctatgactttaggagacttggaaaccgttgtacaatataagttaccaattaaaattatcgtattcaacaaccgttcattgggaatggtgaagttggaaatggaagtggacggattgccggactggcagacaaatatgttgaatccagactttgctcaagtggccgaagcaatgggaatgaccggatttaatgtcagtgatccggaagaagtgttgactaccttactgaatgcatttgagttggacggtccggtacttgttaatatcatgactgatccgaacgcactggccatgcctcccaaaattgaattcggtcaaatggtgggctttgcacaatcaatgtataagttgttaatcaacggtcgttcacaagaagtaattgatacgatcaattctaactttaagcatatacgggaggtattttaagttattctattttgaatattttcataacctctctcaaggtatgacctactattattgtcaatttcaataaggtaagtcatacctttttatagtctatcttgaggtgataatcattttattttcttatgtttgtaatcatcaaaaagcaaaaacacatggaaaagaccgactcttcgcctttatcccgacaagcgctgtacgcagataaaaaacaatggaatcaattcctttctatttttttattggcagtgggcgttggttttacagtggcaggaattatcttcttctttgcctacaactgggaggaattacccaaatttgcaaagttaggaatagtagaagtgttattagtagcttctgtcctgctcgctacattcacgcattggaataagctcgtcaaacaaattctcctgaccgaagctacattcctgataggcacgcttttcgctgtcttcggacaaatctaccaaacgggagccgatgcttacgatcttttcctgggatggactctcttcactattctctgggcggttgctatccgtttcgctccgttatggctgacgttcatcggattactttgtactacgatatggttgtacaatatacagattgccagtgccaactcctgggaaatgactttgctggccaatgcagtaacctggatatgtgccttaacaacgatcatcacggaatggatgagtgtaaaaggtcacttggacagaaacaatcgctggtttgtcagtcttctttcactggctactattatacataccagttttctgttaatgatggcaatctgcgaagaaaatgccatattgtctgttcctctcataagcaccctccttttattctctgcgggactttggtatggatggaaagtaaaaagcctgttctatctggctatcattccgtttgctgcattaatgattctattgactacattcatatcacaaagcggtcttagggatgttcagatattcttctacggaggggttattgtcatcaccggaacaactttactcatttacatcattcttcatctaaaaaagcaatggtatgacacagaagcatagcctcaccattcaagccgtatctattatcggaggaatcctgacggctattttctttctgggatttctggcacttgccagaatcctccgctccgatatttcctgcctgattgtaggaagtatattaattctcactaccctaacaatcagccgcatggtgatccggtcttttctggatgcaatgaacatcactttatacatagccgggtgtgtattgattggttttggtataaatgccagcattaatatcctcttcaccacacttatgggaatcagtattctcacattcttgttatcaagagggtttatcctcccctttctttcagtcattctgtttaatatatctttcttcggagaagccgcccatgtcttttcttcgttttatcccttgcaaatagctgtagttcctatccttgcactatttctatttgccaacatctttgaaactaagttgtttgaatgtataggaacaaagaattacttttccaaatacaaaccatttcatttcggattattcatatccggtatcgtctcactgggaggattatcaatcaattatctgatatcagaaacaaatagctggcttgtatcctgcatactgtctgtttgtatatggatcggtattcttataatggttcaacgaatcatgcaggtcatgaaagtggatcatccggtgaatcagattggtatctatattctttgtattgttatctgtctgcctaccgtgtttgctccttatttatccggcagtttgttgctaattctaatatgtttccattatggctacaaagcggagtgtgctgcctcgcttcttctttttatctatgccgtttccaaatactattatgatttgaatttaagcctgctcaccaaatccatgacacttttcttcatcggaattgcatgtattacagcctggtatttcttcactcaaaaaagaacaagacatgaaaaagtatagccgaatattgattattgcaaacctgatactgctactgggatatttcaactggtcggtttataaaaaagagcaaactttgaaagacggacagttgattttgttacagctagctcccgtcgatccccgctctcttatgcaaggagactatatgaggcttagctacaaagaagcttcatcagatctgctagaccaacaaactgccatacgcggttatgccatacttcaaattgacagtaatcaagtaggaaaaatagtgcggctgcaaaacgctttagaacctgtaaacgacaatgagctagtcatcaaatataaaatagtgcgtcaccggatcttcctcggtgccgagtctttcttctttgaagagggacaagatactctttatcaaaaagccgtatatggcgggctgaaagtggatggtaaaggacaaagcctgctcgtaggactgtatgacgagaacttccattatattcaatccgataaataaataataatgaaaaagcccagactttcgcaagcccggactttctatattctcaaaacatctccttaatctatagggaaataagggactagcaaattggtttctagtgcaaataaggagatgttatgaaataaagaaaagggatacctgtgggaaataagggaggtatccctttctataagaagaacagaattggaaggattgactttcacaagccaaatccttcactctgtttcttcttggcgtattcttcacacaaggtgaagaagggttttatctgttttacttcacattagcaggtatagttactgttattacattattatttgcataattagtaattgtaccccattgtgagctagcaacaatcattacgtaagcggtataatcagtttggaaattatatcctttaccagtagttgtaaatgacaacttaccatcattaccaactgttaagtatggacaagttgtatctttgccttcagcatctacaaatttgaatgaaggagcagtcaaaccataaatagcgagtggagtagctgtgccaaactcaacttggtcatctacctgactaccatctttccacatagctttacctctcatatcattccaactaaatccatcggccaaaggataaacaccagccttgctgttcagttctactgctttcttaccagcaacccaagaaccactaatatcattgatatttacatcagctgttaatttctgaagaggtgtagtcgtacccgctaaagtcactgtagcaacgatttgtactttcgcatcttttccgtctgtagtcttacctgtatattcatccttcttaaatgtcaatgtcggttcactatagctaatacctttaatcttattccaattaggaacatcaattttcaaagtagcacctgtaacaccagtaacagctgcctgcacagcagaatagttagtaaacagcttggataagtcatagctcaaagtaatagaaaatggtttttcttcctgatccagtgttggagtaaatccaactttaccagctgttgctgttccaccccaaagatatttatctactgccaactccgcaatttcagggttttgtactgtaatagtagcagtaactataatttctctaccatcagaagtaaatttagccttaataggataaacaccggcaggagtttgtgctgcaatgacagctgttaattcatttttagaagaaagatctgtagaaatagcaaaataaaccttatcagttacttctttcactacttcacctgtcaaagcttggaattcagtaagagtcagcttcacgtcttcagcatcataaatcttattcaatgggaatttcgaagctgcaacagtttgtgcgccattactccaagttgcaggttcaatcttaccataatcaatagtagcttttttagttgtcttagtaacagtcactgtaccaatcttcttatcagcagcaggagtatagaagcctgcagcagtcactttcgcattaacatctgtaacttggccaatataacttggagtctcataggcattcagcattacagcagtaccactaactttgaagtaagtgtcattaactacactaaatgttgtagtcaaagattttggatcaaagcctggatattcagacaattcaacctctgacggagtagttccatctgcactattagatacagataatacaacacgacctttaccgttatattctgccttgccatctttaacatcgtaaggaagttccatatctacatcagcaccagaatttgctttataatatgcatctaccaaatacttcttcccaacaatagctgcgaaataatcagaagtaatatctgttttacctaatgtttctactttatcttctttagtaactacgtgcatacacacagcaaagctctttgtagcattagacttaattgtataagttactaagccaccatctacaactggcttatcaactaccacaaactgatctacctgcacagctctcgtcatttctctatctgcactgaaagtcacatcataattgtctacaaatgattcagcagcatcagcaggagaaatacggaacataacttcttgagtagaagcaccatcaagagtaattgttccataattggcatctgccgcttttgatttagcatacaatgtagtaaagtttactattctatcggatgtcttaggaacaaatgatacgctttgcaccatcttcttgatagcattgatctcatcttgaagttttttcttcaagctagcaagtgacgaatcttcttcttttaattgtgcttttattatagcctcaattgcttctgtcagatttttactacctgcaggaagacttaatgcagtcaaagcctgtctggatgcttcaatttggtttagaatatcagcatacttctcgtagttatcattctctttaatgaaggcatctacagcttcttgcaacttttccagttctgtcaatctagccagaataccatcttctttatcatataaaagagtatagcaatctgtaataaatgcttccatggatttccaaacaccacctgtcaaagtagaaacttcattattgatagctttaaaatcagctaaagtagctttctgtactacaccttgaacatatgcagcaatatcaccctctttctctattgcctctttaatgctattattgattaatgcatcgaagcttgtgttgtcaaatccacttaaatcacctgattctttatatttttgctctgcttttaccaaagcatccaaagttgatgatactttatttaaagcatcaatatccgtttttaatttagcaatggtttcatcagtcttaagattttcccatgtcaacaaattagtcttgtctgccaactgttttgcaagatctgccaataaagcttcatctccccctttagctaaggcatctttcaaatcttgaatttctttttccaaagctgtaatatcagctttcttgttcaacagttctgtcaattcacttttagctttatcaacagccgctttcaattcttccgagctaaccggacttgtagatgtaatcttatcaatttgctcctgcaaatttttaacatcatcatcgtagtccttgcaacttgtcactgctgtgctaactgcaagtgccaacgccccgaagaacatcacttttacaaattttcttttcataactacttaaaaattacattaataatatattatcaaacactaagtttcaataatagcacaacccgttactctgtaggtaacagagaaacctttgtgcctgctcttcgagagtagtcaatactgaaaaatgataccaaatgtgatgaaacttttttacccctgcttctgaaaggcagtagaggggaaggaaatcttttgcaaaatttagaagttaacaaagccctaatacaaagaatccgcgtgttttatttgtcctagttctacttttgaatgctttattagaaaaaatgtgtgatttcgtttggttgttttaagaaatatgctcatatttgcaccgatattcattcccgttacctacagagtaacagaataattttcaagcacttacacctgtcactgaacgctttacaaaatcgagaacttgcttatttgcttcatcaattttcttattcctgaaaggcttcagataagtttcagtgacggtgatagacgaatgtcccatcgcttcggaaataatacccggatggatttcacaataataagccgtcgtagcccaggtatgacgggcagtgtatgaactaagtttatctcccaatccgagcaattcacccaataacatcagctgttggttaaaactacgtaatgcaagctgatattcgcgataggcttctttagttccttcccgacttctcaacaatggaaataaataaggagaagaagaatcacgattcatgtatttctttaccaaagccattgcttccggagtcaatgtcaccgacaatggtcgcccggttttacgtctgcgatacgttattacattatcgcgcaaatcactcttacgcaaataagcaagatcgacaaacggcataccacgaagcgaaaacatcagtatgaatagctcctgcgcctgatataccgctaatggcgcacccgatgcacgagataatttagtaaacaccttcttcatatcgtcatcacccaacgcacgtttatggtcagcccgcgttccggtataaacagaacgaaataaatgaggaacataaggagccttctgaagatcgaccgcacgattgtaaaccgcacgaaaggtccgtaaataggtggaaacggtgttccaactacatccacgactgcgaagatatacttcgaaccctttcaaccactccgaagtcacttcactaaaaacaaaatcatttttcccacgataagcaatgatggcattcagactactacgatagacatgtgcagtcccaaagtttccctccatctgtaacccagtggctacctgcttcataaatgctagtactttcaacatctcataatttattaataatttagacgataaatatacgagtattatcccatcaatggaaataccccgcatgaacaaacaaaggaaatagctaagatgttccaaagacaaaagagcacgaaaagcccggactttcacaagcccgggctttctatactctcaaaacatctccttaatctatagggaaataagggactagcaaattggttctagtgcaaataagaagatgtaatgagacaaaaaaaagggatacctgtgggaaataagggaggtatcccttccaagagacaaacatttgagaaaacatactttcacaagcataattttcagtctatctcttagcatatttctttttaaaggatttattatcctatattacaacttgtaaagagaaggcatcttaagtctaagaagaattaggatgccctcaattacaaatcctttaatcctgattacttatttacttttacgtagattgatacagatttagttctgccccacttatcaagaatattaacatttactttacaagtaggaggagttaggattacggcaccctccttcttagatataacaactttctttggatcatcagtaagattaccatcgttcttcgccaaataagttgtagcgtcatcatctgctaatacaactgaaacagactctattctgttatcgctgaattcataggaattaccacgagcatctattctcttgaaatctttagctgatatttctacagtatttccttcgattatgaacggatttgcttctgttcctataattttcttatctacttctttggtatattcgaaagtaccttcaaagatttctgatagtattgtcaaattgaatctatcagtaatagctttcaaacgagaatttccgaatggtgcataagacacagtaatataacgaccagtataagcaccaccccaattttcatcagttgctggcttagaaacataagggaaaactttaatttttgaattctttgttgggtgtgggagagtctcatccaaccatgcaggagcaaactgctttttaccacttaccactctagaaggtttctcttcagtgaatgtaatattattctgtttatccgctgatatagaaccttctttatatagggtgtaaagatcgaagccaatctttgtatcagcagtagcagcaagaactgcagtagtcggtactgtaccataagccttggcattatcaccatcaaagtaagcagttgcacgtttaaatgtgaacaatttatcattctgctgatctacagtaatcttgaatgtagtttcatacaaaaagtcattacccaaacctgcttgggaatccttatttttgaatttaactgtagcagtatgagatacggcagccacatttttttcgtcaaatgtagcttggattacaaatttagtaattttagctatatcagcttcacttgttcctgatacaggctttccgtctttatccagacctaccaattttaactgaatactaccatccatataagactgaaccacctttccattgatcattgccttatcatcagtataagcaatagtcgcaactattgggtctgacagtttaatttgtcctttaatctcatctactgaaggacctactatttcagaagtagctgtcttattgctagcatctacgacccaagtcatatctttgatttcagctttcttagacacataagtaaacgtcaattcaacttcaggatcttgagtacttccatcaacaagaagacagtgaatcttaactttcacctgaccctccttatttgctagaattgtattcttctctttatcaaattttgcatcagcttttttagcttcttcatcagttacctcataataataagctaccaccttatccaattcactaccaaacaattcatccaaattataggtagtttggtaaggcataggttcaggagcagtaaaattaacatccggtatattttggctgctagccttaattttcacaccatactgggaaatgatttcattaccccatgcatcttttgttgtaagcgcataagcagtttcagcactttccaaagctgtcaattcgtccttagtcaatccgtctacaaacttcagagtcaaatcgtatacacctttatttgctgtaggctctttttccggatccgctgcacgagtcaaagcatctatactaaaattatctgctatatttgcaacagcaaaattagtattacccttagagtccgtcaagcctatttcataagcttgaatatctgctgccttcaagtttacaggattaatcaatgcatgaatcttgctgccacctctagcaacaagcaaatcccctttcttcttgaaagttttgtttccattaaacacaatatctttgccagctatgctataatataaagtagtttcagcctctgtagaaccaacatcaacagaaccatcgccttttataccaagcacactcatactagtgatacgagccgatttcggcatagaaaccgtttcccattctttagtctccttattgaaaatattcaatatccaaaccaatggattactagcatcagcagctacataaatatcagtagcagctttaatttttgtctctacaggttttttagtttcagcatcccaaaccatccagaatccattttctgaaatttgaggtgcatatccgtcttctcctttaccacccggagatcctgcagcgcccggtttgccatcagcacctttctttccttctgcacaaataccaagatcattatcattgacaatccagttctttgttaccggatcaatcttaatagtcgttggtgtagcatccttaccgcttgtaatagaataacttttattatcattaaaagttatcttaaatccatcggtaatttgttcaacattggtaacccatttaccttctttcacaaaattctgcaactcggcgatactagctttgttcgcgtcaatctgcgtttgcagattgtcgatgtcatcatcatagtctttacagcctacataggtgacagtagaaagtgccagcgctccgaagaacatcacttttacaaattttcttttcataactacttaaaaattacattaataatatattattaaacactaagtttcaataatagactgcccgttactttgtaggtaacggagaaacctttgtgcctgctcttcgggagtagtcaatactgaaaaataatacgatatgcaatgaaacttttttacccctgcttctgaaaggcagtagagggaaggagatcttttgcaaaaatttagaagttaacaaagccctaatacaaagaatccgcgtgttttatttggttaattcctgttttgagtagtttattagaaaaaatgtatgatttcgtttggttgttttaagaaatatgctcatatttgcaccgatattcattcccgttacctacaaagtaacagagtaattttcaagcgcttacacctacaacagagcgtttcacgaagtcaagaacttgtttatttgcttcatcaattttcttacttcggaaaggtttcagataggtttcagtgacggtgatagacgaatgtcccatcgcttcggagataatgcccggatggatttcacaataataagctgtcgtagcccaggtatggcgggcggtgtacgagctcaacttatcggataatcccaataattcacctagcaacatcaactgttggttaaagctgcgcaatgccaactgatattcgcgatacgcctctttggttccttcacggcttttcaacaatggaaacaaataaggagaagaaggatcacgattcatatacttcttcaccaggatcatcgcttcgggagtcaatgtcactgacaatggccgtcctgtcttacgtctgcgatacgttattacgttatcacgcaaatcactcttacgcaaataagcgagatccacaaatggcataccacgaagcgaaaacatcagaataaataactcttgcgcctgatataccgctaatggcacaccggacgtacgagacaattttgcaaatacctttttcatatcttcatcgcccaatgcacgtttatggtcggcacgagtaccggtataaacagaacggaacagatgaggtacataagaagctttccgaagatcaacggcacgattgtaaaccgcacgaaacgtgcgcaaataagtggaaacggtgttccaactgcaaccacgactgcgaagatatacttcaaatccctttaaccactccggactcacttcatcaaaggtgaagtccactttcccactataagcaatgatggcattcagactgctacgatagacgtgcgcagtaccgaagtttccctccacctgtaacccgttggctacctgcttcataaatgttaatactttcaacatctcacttttattaataaatttgattctaaatatacgaagtattctcattactaagaatacgttgaccaaacaaaatataaagcaaggatgttttgaaaagatcaatttgcagaatagattgataataaaaagaacgagggtacccttttcggacaccctcgttttcatattcattcagcgaaagccggaattacatcattccgcccatgcctcccattccgggagcgcccatcggcatttcgggcttatcttccttcttttctacaattacacattcagtagtcaggaacataccagcgatagaagctgcattttccaaagctacacgagcaaccttagcaggatctactacaccggcagcgtgcaagttttcgtaaacgtccgtgcgggcattgtaaccgaaatcacctttaccttcacgtactttctgaacaactactgcaccttctttaccagcgttagcaacaatctcgcgaagcggttcttcgatggcgcgtttgatgataccaataccagttgtttcatcggcattatcacccttcattccttccaaagaatcaatagcacggatataagctacaccaccacccgggatgataccttcttcgatagcagcacgagttgcacgcaaagcatcgtccacacggtctttcttttctttcatttctacttcagaagcagcacctacatagagaacagctacaccacctgacaatttagccagacgttcctgcaatttctcacggtcatagtcagacttagttgctacaatttgtgctttgatctgttcgcaacgttccttgatgctatctttgttacctgcaccgtttacaacagttgtatagtctttagtaactgtaactttgtcagcagtacccaacatttcgatggtagcctgttccagtttaaaacctttttcttcgctgataacaacaccacctgtcaggatagcgatatcttccagcatttctttacgacggtcaccgaagcccggagctttcacagcacagatcttcaattgagaacgcagacggtttactaccaatgtagtcaacgcttcgctatctacatcttctgcaattaccaacagaggacgaccagtctgtacagcaggttcgaggataggcaagaaatctttcaggttagaaatcttcttgtcatagatcaggatgtaaggtttctccatctcacattccatcttttccgtatttgtcacgaagtaagcagacaaataaccacggtcgaactgcataccttctactacaccgatagtagtgtctgttccttttgcttcttcgatagtaatcacaccgtctttagaaactttacgcatagcgtcagcaatcaatttaccgattaccggatcattgtttgcagatacagtggcaacctgttcgatcttgtcatagttgtcacctacagtttcagcctgatccttgattgattctaccactttggcaacggccttgtcgataccacgtttgatatccatcgggctagcaccggcagttacgttcttcaaaccttcagctacgatagcttgtgcaagaacggttgcagtagttgtaccgtcaccggcatcgtcacctgtcttagaagcaacttcttttaccaactgtgcaccagtgttctggtaagcatctgccaattcgatttcttttgctactgtcacaccgtcttttgtgatgtgcggagcaccgaatttcttctcaatgataacgttacgtcctttcgggcccagagttacttttactgcatttgccaaagcatcgacaccttttttcaattggtcacgggcatcgatattgaataatatttcttttgccatctctttatttactatttaaagatttactatttactattattaattaacccaaaacagcgagaacatcgctctgacgcataatcagatatttagtaccttcaacgtcaagttctgttccggcatatttaccataaagaactgtatcgcctactttcaataccatttcttcgtctttcgtaccgtgacctattgccacaacttcacccttcaaaggtttttcttttgctgtatcagggataatgataccaccaattgttttttcttctgcaggtgcagggaggataagcactctgtctgctaatggtttaatgttcatagttacttgttatattttagttatacatttaatagtagatgttacccgccatttttcaggcggaacgctaaagttattgcgaaaagcgtgccaaagtaaataaatgattctttgtcagaaatagactgacaaaatgactgacaacttgcattgtatggcaaaaaagtatatttgtcacctactttttaaacaaaacaaaaggattattccttataatgacgtatattcgtaaacgaaccatcaaatgcactgtataaataatatgaatggaatagcatccggcctcatcatcgcctcttgcgtcttctactcctgcacttcgcgtacaggagagatttctcctgtacacgaacaacaaacagactcgctgtcacaggatacaatagttcaacccgaggttaaacctgttaataaaaaactcacggcagagcagatagaaatctccaaagatttattgtatgaccaatacacattggaagatacctatccttataaagacactacccggcagtttcagtgggataaaatcaaagaacggctggcattactcgaaaatatacagttgcagccttccacctgggccattctccagaattacaaaaacagaaatggagaagcaccacttgtgagaagtttcaaaagaaacgcttacggacgagtggcagatactcttggcatagaacgttaccaatccgttccgctttatctattgactgacacattagtacccgaacgttacggacaggatggggaattaacccgttttatcgaagatggagagaaattcataaaagcagagccaatgtttaccggagatgaatggatgattcctaaaaaatatgtcaaagtaatcggagatacgattgtttttaacaaagctgttttcgtagaccgccacaatcagaatatcgcttctcttgaacgtagcggaaaagggcaatgggtggttcgcagtatgaatccttccactacgggacgtcatctgcccccgtatgcacaggaaactcctttaggaatgtttgttttacaagaaaagaaagtgaaaatggtatttctaaaagacggctcgaaagaaacgggaggttatgctccttatgcgagtcgtttcacggacggggcctatattcacggagtaccggtcaatgctccccgcaagacgcagatagaatatagtccgtcgttgggaactactccacgctcacacatgtgcgtgcggaatgcaacttcccatgccaagtttatctatgactgggcccccgtaaatgaaactattatttttgtattggaataaccgttgaacaaatcagcatcgccattccctgattcttattatctatcttatgaaatatggttagaaaacatattctctataaggaggaaacttactttcttccttgggaaaagttgcttttcccttatcccaaactataactgcaagttccggttataaaactgcaactttcagttatgtaatcaaaagtttcagttatataatcagaacttgtggttatagtttatcttatactctaaacaagttttctccctatgcaaaagaagttggcataggatgaaaagaaacttacctatacgtacttgagagagaaaacaaagaggtccgaactcttcagtccagacctccaattataaaaagggatttctttatcccagatgatctcttatcaatcaaatatcttctttcttttattttctccggtttcactcaacccatactttgccctcgttatattctgaattatctctctctgtacactttccaatgcacttatttctttttgtaataactccaaggcagaacctttctgcaataaataagaccgttcagtatattttatataagaagtcggaatctcctgcttcttttctttataataggcaatcgcatatcgcaaagcttccgatctatatttgcagacagcctttcgttcggcatagtacaaatctttataagcattctcttcacttctcaactttttccagaatgcggaaaaggctgttgatacagcatctttctcttccttggttaccgcttccttttgcttcttcaccagatctttatattctttgtatgtatttaaaaacttatccagttcctctttactggctttatgttccagacgataagtctccaaagaagcaggacgctcatattcgacaacctgttgcagataaggcaaatcattccaacttatatatttattgtttgcttcacaataatctgcgtaagcagctgcaagctgccaactatattcttttgtcttttgactcaattcctcgttgatggcggacaagttcttttccatctctttcaagtcctgtgctaataccgcttgcatacttccccatccggagagaaacaaacaaagcatactccataaaactgttttcataataagatgatttaaattttctccaaagttattgtttctctacagaattccaaacacaattacagatttgcgatatatttccataatggagcagcattcagcgcttgcataatttcgttcttatcgagcagacttctcacctcttccaatgtgagcagatggacggtgatatcttcagtagcttccagatgctgatggtctatcagttccacgtctgtggcaagaaagcagtaagtcagattggtatgagtgctcggattagcggaaatcaccatatactcttgccagtttccttttccgtagcccgtttcttcccacaattcacgctgggcggacaccaacggcgaagcatcttccttctcgcagacaccggcacagagttcataacaagttcgttcgattcccggacggtactggcggacaaaaacgaattgaccatctttggtaatggcaatggtatttacccagtcgggatactcaaggatataatactcggggatatgattcccattgggaagtaacatatcttcgcaacgcacagtcagccatggacggcgaaatagatatttgctacttaccgttttccaggctttattcttctcttccataagatttgtttttctcccggcaaaaatacgaattcctccggattatcctacctttcggttgcttgtttttattcgtctgtgtcgatacaagtgatctctatctcatgtatctgctccaagtattttttggtagagcttaccaaagaacttcccatgtagaataaaaacatcaggctgataataaccatcaatgcaccaatcatggcaaaacgactgcgctgttcaaaaatactgctattcataactctgcctcctcttattttttgtccactacaaagataacacgcgagggctacaaaaaagttacaagaatgtttcaaaaaacttaaatattgaaattctgttcgtatctttgcaccaactaactaacaacctctttattacaatatggcatttacgaataatattatgattgtccggcataaactgctggcagaccttgttagactctggaaaaacgacgaattagtggaaaagatagaccggcttccgattgagttgagtccacgaaaatcgaaacccctaggacggtgttgcgtacataaagaacgcgcagtgtggagatacaagacttttcccctgatgggactggatatgacagacgaacacgacgaagttaccccactttccgaatatgcacgattggcattgagtcgtcccgaaccagacaaggaaaatatcatgtgcgtcatcgacgaggcctgttcttcctgtgtacagatcaattatgaaataaccaacctttgtcgcggatgcgtggcacgtagttgttacatgaactgccctaaagatgcgatacgtttcaagaaaaacggtcaggcaatgattgaccatgacacatgtgtcagttgcggtatttgtcacaagagttgtccttatcacgctattgtatatattcccgtaccttgtgaagagtcttgtccggtaaaagctatcagcaaagatgaacacggcatagagcacattgatgaaagcaagtgtatctactgtggaaaatgcatgaatgcttgtccgttcggggctatcttcgaaatctcgcaaacattcgatgtattgcagcgcatccgtaaaggggaaaagatggtcgccatcatcgccccgtctattttgggacagtttaaaacttctatcggacaagtgtacggtgctttcaaggaaattggatttactgatgtgatcgaagtggccgaaggtgctatggcaaccaccagtaatgaagcacacgagttactggagaaactggaagagggacagaagtttatgactacttcctgttgtccttcttatatcgaactggtagagaaacatattccggatatgaaaccttatgtttctaccaccggatcaccgatgtactacgctgcacggattgccaaagagaagcatccggatgctaaggttgtatttgtcggtccttgtgtggcaaaacgaaaagaagtacgccgcgatgaagccgtggattatattctgacgttcgaagaaatcggttcgattcttgacgggctgggtattcagctggaacaaatgcaggagttctccgtattacatacttccgttcgcgaagcacacggatttgcacaggcaggtggtgtgatgggagctgtcaaagcttatctgaaagaagaagcggagaaaatcaatgcgatacaagtgtcggacatcaataaaaagaatatcgctctgctgcgtgcctgcgccaaaacaggaaaggctgccggacagtttattgaagtgatggcatgcgaaggaggatgtatcaccggaccgagtacgcataatgacattgtttcgggacgtcgccaactggcacaagagctgctcaaacggaaagagagctatgaaacaatggatcgataaactacgacaggaaagaacactgacaccggaagagttccggcaactgttgaccggatgtgacgcagaaattctgcgttacatcaataaacaggcgcaggaagtcgcactcctccacttcggaaataagatttatatccgcggactgattgaaatcagtaactgctgccggaacaactgttattactgtggtatccgaaaagggaatccgaatatcgaacgttaccggttaagccgggagagtatactgaactgttgcaaacagggctatgaactgggattccgcacctttgtattacaaggaggagaagatcctgcactgacagacgatcggatagaaatgactgtcgcccgtatcaggcaggattatccggattgtgctattacgctgtcgctcggtgaaaaatcacgtgaggcatacgaacgtttcttccgtgccggagccaaccgttatctgttacgtcacgaaacttataatgagttgcattaccggcaactgcatccagcggaaatgtccggcaaacgacgcctgcaatgtttagcggatttgaaagagatcggttatcagacaggaaccggaattatggtcggcagtccgggacaaacagtagagcatatcattgaggatctattgtttatagaaaagctacgcccggaaatgattggcatcgggcctttcctgccccatcatgatacaccttttgccgaatatcccagcggaacggcggaacagacgattcttctattatccattttccgcctgatgcatccgtccgcattgattccggcaacaacagctcttgccactctcattcctgatggcagggaacggggtattttagcaggtgcgaatgtggttatgcctaacttgtctcctcgagaggaacggagaaaatatgaattatataatgacaaagcttcactcggagcggaatctgccgaagggctggctgccttacaaaaacaattgaagaccatcggctacgagatttctaccgaaagaggcgactttaagtacactacagagaatatatgatataccaaaaagattcatcaaaagcagaagagtttatccatcatgaggagattctggatacgctggaatatgcgcagaacaataaggataaccgtgtcctgattgaacaactgattgaaaaagcggctttgtgcaagggactgacgcaccgggaagcggctattctgctggaatgtaaccaacctgacctgatagaacgtatctttcatctcgccaaagaaatcaaacagaagttttatggcaaccgtatcgtcatgttcgcaccgctttatttgtcgaactattgcgtaaatggttgcgtatattgtccgtatcatgctaaaaacaagacgattgcacgcaagaaactgacgcaggaggaaattcgcagggaagtgattgctttgcaggacatgggacataagcggctcgctcttgaagcgggtgagcatccgtcactaaatccgatagaatacattcttgaatctattcagacgatttacagtatcaaacataaaaatggagcaatccgccgggtaaacgtaaatatcgcagctactacagtagaaaattatcgccaattaaaagaagcgggtatcggtacgtatatcttattccaggagacttatcacaagaacaactacgaagcacttcatcccaccggtccgaaaagcaattatgcctatcacaccgaagcaatggaccgtgccatggaagggggaatcgatgatgtaggtattggtgtgcttttcggtttgaatacttatcggtatgattttatcggattgttaatgcatgccgaacatctggaagccaaattcggtgtaggtccccatacaatcagtgtgccgcgtatctgttcggcggatgacattaatgccggagattttccgaattcaatttccgatgagatattcagtaagattgtagctgttatccgaattgccgttccttatactggaatgattatttccacacgtgaatcacaagaatcacgcaagaaggtactcgaattgggtatctcacaaatcagcggcggctcacgtaccagtgtaggcggatatgctgaaacggaattacccgatcataattccgcgcaatttgacgtaagcgatacccggacattagacgaagtggtcaactggttgctcgaactcggatatatccccagcttctgtactgcttgttaccgggaaggacggacaggcgaccgtttcatgtcattagtgaaatccggtcagatagccaactgttgcggaccgaatgccctgatgactctgaaagagtatctggaagattatgcttccgaagatacccgccagaaaggattagaattgattctaaaagaaacagaccgaatccctaaccctaaaatcagggaaatagctatccggaacctcaaagccatagccgcagggcaaagagattttagattttaaatcatacgccaatgtgccaatatatcaatgtgctaattagctgcgcatgaattaacaaattgaaaaattagtaattatgagcctgacagatactccaaatgccaacagacttcatatcgcccttttcggtagacgaaacagtggtaaatcttctcttatcaatgcattgacaggacaggataccgccctcgtttcagatactccgggaacgactaccgaccttgtatccaaagctatggaaattcaaggtattggtccgtgtttgtttatagatactccggggttcgatgatgagggagaacttggagagctgcgtatcagccggactttaaaggctattgagaaaacagatattgcattgctgctatgtggagatactaccttttctcatgaaaaagagatgctggcactattgaaagagaagaatatccctgtcattccggtactgaataaaatagatatacgagagaacagtgatagcttagccacgtatattgaggaagaatgtaaaatacgcccgttacttatcagcgccaaagaaaagacaggaattgaacagatccggcaagccattctcgaaaagctaccctcggacttcggtcaacagagtatcaccggggaacttgtgacagaaaacgaccttgtacttctggttatgccgcaggatattcaagctccaaaaggcagactgattttaccacaagtgcagactatccgtgaattgttggacaaaaaatgtctcgtagtgacttgcaccactgacaagtttccggcaaccttgcaagctcttgcccgccctccgaaattaatcatcaccgattcgcaggtcttcaaaacgatttatgaacagaagccaaaggaaagtgaactaacctctttctctgtgcttttcgcaggatacaagggtgatattcattattatgtagaaagtgcagctaccattgaaagactgacggaatcgtcgcgtgtactgatagcggaggcttgtacgcacgctcctctttccgaagatataggaagagtgaaactcccccgtttgttacggaaacgaattggagagaatctgcaaattgatatggtagccggaactgactttccacaggatctgactccttactctttggtaatccattgcggagcatgtatgttcaatcgtaaatacgtacttagccgcatcgaacgtgctcgggagcaacacattcccatgacgaattatggagtagcgattgctttcctcaatggaatactagatcaaataaaatattaaaaaagaagtcgactctcttttaattttaaagtgaacccccaaagtcttttatctgacttcgagggttcacttcatttttatgttaaagcggcctctttatatagagagttctaatatctctgcttatttcttcactacagcaatcagttcttctgccgaaacaagattttgttcccctgtctccatattcttcaacatggctttgccttcgttcatttcattctcgccgacaatagctacaaacggaatattctttgtattggcataactcatctgtttcttcatcttggctgcatccgggaaaatctcggcacggataccggcagcacgcactttcgacagaattcccatagagaatgcagcttccttttcaccgaagttgatgaatagaagttctgttccattcacagcttctttcggataaagttcaagttggttcaatacatcgaagatacggtctgcaccaaaagagatacccactcccgacactcctgccataccaaatactccggtcagattatcatagcgaccaccacctgtgatactaccaatctgcacatccaacgctttcacttcaaagatagcacctgtatagtaattcagtccgcgagccaatgtcaggtcaagctcgatttcattcttcaagcccattgtttccaatgtattcaggataaattcactttcttccactcctttcaatcctacttcactggccgataatacattcttcaatgttgccaacttttccgcattcgtaccgctaaggagaatgattggctgcaacttggcaatagcctcatcactgattcccttctctttcagttcggcatttacattatccaaacctattttatccagtttatcaatcgctacagtaatatcgacgattttatccgattcacctataatttcagcgataccggaaagaatcttacggttgtttatcttaatacatacacgaatattaaaacgactgaaaacagtatcgacaatctgcatcaattccacttcgttcagtaatgaatcgcttcctacaacgtcagcatcacattgataaaattcgcgataacgtcctttttgcggacggtcagcacgccataccggttgaatctgatagcgcttgaacgggaaagtgatctcatcacgatgcatcacgacgtagcgagcaaaaggtactgtcaaatcataacgcaaacctttctcacaaaatttgcttgccagtttgactgcattacggcttaataattcttcgtcagtaatcccggaaaagtaatctcctgaattttgaatcttaaagagtagtttatccccttcatcgccgtactttcccatcagtgtagaaagcatctccatagacggagtctctatctgctggaatccatacaaatgatatacgtcacgaatcgtattgaatatataattacgcttcgccatttctaccggcgaaaagtcacgagttcctttaggaatacttggttttgctgccataatattactgtttataattttaatggcgcaaatttactgcaaatttccgagcaatgcttacatatatttgaaaaaatcacccgtattgtgtccatcccctattaatatcgtaaagaaacactcaaacaagtcctccaaactatataaaaaatcctccatagtctttggaaagactgcggaggatccctttttattctatagaaggaagctggcaaaactgccttttccctttttcatttcttagtctcttctacccatgaaaatcatgatgtagtaaaccaatgttgctaatgaacctaatgcagcaactacatacgtataagcagctgaacgaagagcgtcttctgcctgtgcatgattgtacgaattagtaatgccggatgaactcaaccataccaatgcacgtttacttgcattgatttccaccggcagcgtgataaagctgaacaatgtagtcatagcgaacaagataatacctgccagcaataactgcggaaaagagtttatcagcaagataccacccaacaatacccacgtcataatggaagaagcaaagttcacaaccggaaccagcgcactacgcatcttcaacggagcgtacatacgtgcatgctgcacagcgtgtccacattcatgggccgctacggcagccgccataatgctgttactttcatacaccccttcactcaaattcactgttttgttagtaggattgtagtggtcggtcaaccgtcccggcgtatgtgtaacctgcacatcataaattccattgtcatgcaacatcttcaaagcaacatcgcgtcctgtcattccgtttcctgtaggaatcttagagtacttcttgaatttgttttgcaaattcatctgtaccaaccaactgacaacagcgattcctataaataatacccaataagacatcatatacttttcaattttaattattactctatatatctataaacaaattgtttgccaaaaataaggggaaacgttcaatgtcagaatagtttccccttgcttttatgaagaattagctaaaaattagtcaattgtcagttctactacatagtcaatatcttttggtacctcggcgaattcgagcaaaacaccagctttcgtctttgtgaaacgaaccggagactgatctttaaacaagactgctttcttaaccttcttgcctgtcaatggcaggaacaaagctgcatctttcaggtcgaggatatgtacatagagtttatttcctttttgtgtggtcactccccaatcatgcggagcaactatgccgcttcgtgttccatagatcgtttcgccatattgtttcatccactctcccatctctgccaagcgttgcacagctaccgcaggaagttccccatcaggttgagggccgatattcatcaaaagattggcattcttaccggctgccttcaccagatagtgaatcaatgtctttgtagatttataattctggtcggtaatcttatatccccacataccattcattgtttcgcaagtttccaacggcaagcgactcacctcctgtccagaaagtcccgaagcattctcacccggcagatcgcgttcgaaaatctgaatatcttctccatcaaagggcgtctgatgatgattgttacccaccaggcagcccggttggagtttatgaatcaaagcatactgctctggtaattcccagttaaaagatttaggttgatcccaccatccgtcaaaccagatggcacctatcggaccataattcgtcagtaactccgtcaactggttattcatgaattgataatagcttttccaatcccctttcgagttcgaacgtcccgtcccctgtcctgtacgtccccagggatagtcctcacgcgcccagtcaagatgagaataataaaaatgaagcttgattccctgcttggcacaggcagctgccagttctttcacaatatctcttttaaaaggggtggctttgactacgttataatccgaatacttagtatcgaacatagaaaaaccttcgtgatgacggctagtaaaacagatatatttggctcccgaagctttaatggcctccacccatttatcggcattaaacttggaaggataaaatccacctgccagtttggcatactctttataattcagattattgtttgtcatagtccactcaccggtagcgagcatggcatatagcccccaatgaagaaaaataccaaacttattgtcctgaaattcctgccgtgctttcagattctcttcggcaggctgataaggagactgtgcaaatgctcccaagttcatgacgaacaacaaaaggaaagtaataaaacgtgttttcataaggcgtacattatttttctgtgtgtttagaatagactacaaaggcttgaataaaaaaggcggagtttttcttcaatctccgcctttcctccatataataaatcaatggttattcttctgtataacgttcgatcgtctgtgctctgtccggtcctacagaaacaatcttgatttctacgccaagttgttcttccaggaaagtcagataagcgttgaactcttccgggaattcatcttcgctctgcatcttggtcatatctgtctgccagcccggaagctctgcataaacaggttctaccccttctgtgatgtcatacgggaaataatcgatttcttcaccattcactttgtaggcaacacaagctttgattgtttcgaaagtatcgagtacatcgctcttcatcataatcaatttggtaaccccatttatcataacggaatacttcagcgctaccaggtcgatccatccacaacgacgtttacgtccagtaacagaaccgaattcatgtcccaaagtacacatcttgtcacctgtttcatcaaacagttctgatgggaacgggcctgctcctacacgagtacagtatgctttgaagataccatatacttcaccgatacggttaggcgccactcctagtccggtgcaggctcccgcacatacggtattggaagaagtcacgaacggatatgaaccgaaatcaatatcaagcatagtaccctgcgctccttcacaaagaacgctcttaccatctttcaacagattattcacttcatgttcgctatctacaaaatggaattgtttcaggtattcgataccttccaaccatgctttttccagttcagtaagatcgtattcataattcaggctcttcagaatttgttcgtgacgagctttcgcagcagcatacttctggtcgaagttatgaagaatatcacctacacgaacaccgttacggctcactttatccgtgtaagtagggccgatacccttaccggtagttcctactttagcatcgcctttggctgcttcgtatgcagcatccagaatacggtgtgtcggaagaataagatgagctttctttgaaatgtgcaaacgttctttcagcggatgacccgatgcttcaagtgcttctgcctctgccttaaacaatgccggatcaagtaccacaccgttaccgatgatgtttaccttgtttccttgaaaaataccggaaggaatagagcgaagcacatatttctgtccttcaaactcaagcgtgtgaccggcattcgggccgccctgaaaacgagcaaccacatcatacttaggtgttaaaacgtcgactacttttcctttaccttcgtcgccccattgtaatcctaatagaacatctactttcatttttcttttttattgttgttatttacttttttccgtttgttagctctgtcgcacttactacatactccatatatatataaggagtaatgcgaaagctggaagcggctcaatttcgtattttcaatggcttgctgcagttcctcgttctgaaactcggtcactttaccacattgagtacatatctgatgatgatgtgtctcgcgattatatgatttttcgtattgggaggaagtaccgaactgatgcttaatgaccagccgtgcattgataagaagaataatggtgttgtagagagtcgcccggctcacccggaaattctcctggtccatcatccgtgaataaagcatgtcaatatcgaaatgaccgtcgatagaataaatagtatcgagtatggcgtagcgttcaggagtctttcgatgcccgttcgccgtgagatattccgtgaatatctgccttactgtatctttcacgttttgagtttccatcatcagccaaaattagcgcgaacaaagttaagccttttttgcggaaagcaaaagaaattcctagaaataagtaatgggttaattattcttcagtctcttctttcaccatgttgtagagcatctgctccccttccaaggtagaatcagccataccttccaccaggcggcatacttgaaaagcatgttcctcgctatgctgcatatatttgcggataaccagcaaagctgcgttacgaatatgatagctgtcggaatgtaccgcacaaatcgcctggtcgagcaattcgccggaagcacgttcggtcatatcccctttcttcatcagaagacgggcagcagtcagaaaaccgcaagtctgtatatactcttgctcatctgcaatccagtgaaaagatttggccggagcatacggcaaatgctggaagagattcatgcaagtcagctcggctatttcgatattccggatattttctacccaaatgtcggctatctcaggataaaacgtttcaatcggctgaagcatccccgccagaattttacattcgcgaatgtcctctttccacagagcctgtgccaggtcatgattcttctcataattttcggcaatcatcttgatacgaggcagttccactccgaaattgagtttataaaccagccctttctcacgcatactttgggacacagccccgttcatagagagacggagctgtgtcttgatatcttttaattgttcttttatatccatttcaaatcagttgtttattgaaggcagcggagaataatcagtgctgtaacgcagcatttgttctacataaccttcatcataggaaactgtgacatctgtaacagttccgttttcatctgtcaccagttcgtatttcggattcacaaagcctttgtaaggagctagattcagcttcttatagcgttccagaacttctgcatgcagagccggatccacttttaccgcatagttttctaccaatgtacgagcaccttcaaaatcgccagtcgacttgatgcgctgaatttcagctaataattcgccgaaaagctgacgtaccttctgatagtcattgataaccacataagtctttccgtctttcttcaccagttccaccgctttatcggcagctcctttttcaaatacccaacgggctatcagctggcgattgcgcatgtgagcttcttcaacactatttcccggttcgatacgtaccagttgtgtcatcaacccgttcatcagataagtatagtattgagccttataagcatcgggagaagaaagcaatcccagttccaccagcttcggatcggctacataatacaatccgaataaatcagcacgtgcctcttcgatggtagagccataagcctttaatgcatccggatctacgcccggaagcaacttaccggaaccgtgtcccaaacattcgtgcaagtccgtatgcagctcgtccgttaagtcagaataggcatcaatcagttgtatttcagcatcgctataaacaaattcttcgttgaatccgtttccgtgagcggctttattataagcgtctgttatatttccgattgttactgacttagagccgtgatgagcacgaatccagttagcattcggcagattgataccgatagctgttgccggataaagatcacctgcaaggatagcagcagtaatcactttagccgatacccctttcaccttttctttcttgaaagatttatcaaccggagaatgatcttcaaaccattgcgcgttactgctgataatctccgtacgatgtgtcgattccagatctttgaagttcaccaaagattcccaactcgctttcatccccagcgggtcgccgtaactttcagtaaatccattcacaaaatctattcgtgaatccaagtctttcacccaaagaatagcatattcatcgaaatctttcagattgcctgtttcatagaattgaatcagcttggtgataacggccttttgcgcctcattctctgccacaccttccgctttcttcagccaataaacaatcttctcaatagcctgtgtatagagtccgcctactttccaaaccttctctgtcaactttccgttttcttttaccaagcgactgttcagtccgtaagaaaccggtgtttcgtctttcgggtctttcatatcactataaaaacgttctgcctctttctgcgtcactccatcgtaatagttacaagcagaggtcaatacaagatcttcgccatccgcctggtttacccgcttcggcataactgccggatcgaaaatcaccgggaacagctcggcacagagttgatcggcagtctgccctttctccagcggaagcaacttggcatccagaccgagcacggcctgtttcaagaattcctgtgagaagttcggcacaaatttctccgtaccatagtgatgatgaataccattggagaaccatacccttttcaagtacacctccatgtttttaaaatcaggcgtcgttttatccccctgatagtttgtatatactgcttcgagcatcctacggattctcaaattatattttccattctggtcaaacagaatatcccttccttccagagcagcctctgtcaggtaataaatcagttccttctgtttcagcgtcagttcctcaaatccgggaaccttataacgcaatatttgtaaatcagcaaattgttccactgtataatcaaatttttctgcttcagcagttgttgttttacttcctccgcacgatgttaagagcgtggcggccactgtcattaaaatcagatgttttctcataatgttagtattgattaattaaaatgagaaaaggaattatctccaaaatctttcatttagaggtaattccttttgactagtttcggaacgcgcaattatttcttattttcgagatgttttttgcgatatccattaggagtctcacctacgtttttgtaaaatgcagcgtaaaaagattgacgatttgcaaagccaaccatggcactaatttcttccacatttttgtcggcataacgtttgtcagtcaataaatgcaaagcatcttttactctgtattcattcaacaggcaagaatagttcatgccaaagcgtgagtttactactgcagaaaggtaacgagtattcgttttcaattctttcgccaagtccttagctgaataatcaggatccttgtacttcttctgtacaacgatgatattcaggatcttgtcatacaactcgtctgccaattccggtctaatcaaagacctgtatgcagcctttttttctttcttttccctcaaattgtagggacgttttttcggagtttcttccgtttttttgttctctaaatcactcattgaattaactggttagggtttgttcatttgttaattattgctcatttgcaacataacatgttacaaatgtcttactttttttttaaacacacaattattttgtacattttttttctaaataaacaatcaaaaaccttgaaaaagagggaatagggttgaataataagaaactttaacttatttataattcatatcagaaactgaaatctacacataatgaaaattgccaaagaaaaatgtacctttgcagcatggataaatcagcatcaatgagagaaactctaaagacatatttcggatacgatagtttccgtcctctgcaagaagaaatcatccgccacatcctgaacaaacaggatgcattggtattaatgcctactggtgggggaaaatcaatctgctaccaactccctgcattgctttgcgaaggtactgccgttgtcgtttccccacttatctcattgatgaaagatcaggtagaagcattgctggcaaatggcatcgcagccggggcactgaacagcagtaatgacgaaacggaaaacgtccaactgcgtcgcgcatgtgttgaaggacgcctgaagctgctttacatttcaccggaaaaacttttagcagaaaaggattatttgttgcgggatatgaacatctctctgtttgctattgatgaagcgcattgtatttcacaatggggacatgacttccgtccggaatacacacaaatgggagtgcttcaccaacaatttccgcaaataccgattgtcgcactaactgctactgcggataaaatcacgcgcgaagacattgtacggcaattacatctcaaccatccccgtatctttatctcatctttcgaccgccccaacattagcctgactgtgaaacgtggttttcaagcgaaagagaagaacaaggctatcttagaatttattcaccgccacgggggagaaagcgggattatttattgtatgagccgaaataagacagaaaccgtcgcacagatgttgcaaaagcagggtattcgctgcggtgtctatcatgccggattatccacccaacaccgggacgaaacacagaatgattttattaacgaccgcatacaggtagtatgtgccaccattgcttttggaatggggattgataaatcaaatgtccgctgggtcatacattataacctgcctaaaagtatagaaagtttttatcaggaaataggacgtgccggacgcgacggtcttcctagcgacactgtcctgttttattcattaggagatttaatattactaaccaaattcgcttcggaaagtaatcagcaaaacatcaatctggaaaagcttcaacgtatgcagcaatatgcagaggctgacatttgccggcgtagaatcttattaagctacttcggagagacaacaacagaggattgtggcaactgcgatgtttgtaaaaatccacctcaacgatttgacggtacggtcatcgtgcaaaaagcattaagtgccatcgcacgtacggaacagcaaatcagcataggactgttgattgatattctccgtggaaactattctgctgaagttaccggaaaaggttatcaggaacttaaaacgttcggtgccggacgcgacattcctcctcgtgactggcaagactatctgcttcagatgttgcaactcggctactttgaaatagcttataatgagaacaatcatcttaagataacgtcaagcggaagcaatgttctcttcggaagagctaaggcaacattagcagtcatccggcacgaagaagtcgccactcaaaaaggaaaaaagaaaaaagtggttgttgcaaaggtacttcctttcggcctggaaggtggagaaaacgaggatttattcgaagccttacgcggattgaggaaacaactggccgatcaggaggcactacccgcctacatcgtcttgtcagacaaagtattacacctgcttagtatttcccgtcctaccactatagaagaattcggagaaatcagcggtatcggagaatacaagaagaaaaaatacggaaaagacttcgttaatctgattaggcagtttgtagaataatcatacgtcacttgcactgcttaagctgttcgtgcaaatcagccggaggcactcccaatgaaatggctttctcaaagtcagctttggcaagtcctttctttttctgtgccagatagatattcccacgcagcagataagcatcagccgaggcagcatccaaccggatcgcttcctccaaatcaaccaacgccaaatcttcgtgtttcatctcacgttccacgtcggcacgggcaatataaagagtcgcatcgtcaggagtagccgtaatcatcttattcaaaatttcaagagcttcccggaattttccctctttttgctccaaagtagctaatcccagccgtccgctatagctctgcagatcaagttccaataaacgattataatccattctcgcagccggataatcgcggcggagcacataaatataagcacgcatcaacaaagcttccttgttctgcttatcctcatcaagcacctggcaataatcggtataagcacggtctgtttttcccatttccatataaatggcggcacggtcgagtaaaataggaactgccaaaggagcaaaattcagtgcaaaagaataagactccaacgctttatcaaactcacccaaacggcgctggactaaacctaagttagaaaagagtaatgcattcttagcgttcttcggttctaacttcaaagcctgaagcaaaagttcctctgctttgggaagactgtctttctcaatacattcaatggctctctcggacaattgctgataagtttgtgcaaaggcaacagccggaaaacaaaaaagtaaagctataattattcttaccatggttcaggtctttttataatgaatgaattaatccaatggatatgcgtcaaaagcaaacagttcggtcgacaaataacgctctcccgtatcaggtaacaacgctactatttttttgttcttaaattccggacgcaatgacagctgacgggcagcatacacggctgctcccgaagaaattcccgccaacagaccttccgtcgccgctaactcacgtcccgcacgaatcgcttcatcatcgggcacccccatcacttcatctaccacagaaacatcataaagtttgggaataaaattcgctccgataccctgaatacgatgcggagccgcctctcctcctgccaatacaggagacgatgccggttccacagcgacaatataaatatccggattatgtttcttcaaagcacgggctacaccgcagaccgttcctccggtgcccactccggccacaaaaacagccacttcaccgtctgtatcccgccagatctcttcacctgtcgtccgctcatgaacagccgcattagccggattctcaaattgttgtaagatcaccgaaccgggaatactatcacgcaactcctgcgccttggcaatagaagctgccatccctcctaacccgtctgtcaatacaatctgcgcacccagcgctttcaacagattccgccgttccaggctcattgtttcgggcatggtcaatatcaagtgataccctttaatagtggctaccattgccaacccgacacctgtatttccacttgtcggctcaataatcgttgcaccgggtttcaatgctccccgagcttcggcatcttcaatcatcgaaagagccaccctgtcttttatacttcccgctggattaaaagcctccagtttggcaataatattttgttccagaccgtactttccgctataaccggaaagttccatcaaaggggtattccccactaaatctgttagtttccttgcaatctttgccatcttattactttatttttgtcacagacacgacaaagatatggaaaaaaaggtatgttttatatcacttcatgagaaagataaggaaaagtatagtaactttgtatccgttcaatctttttaagtttacagatatgaaaaagagaatcatacaatttctcacgacctattttttatttgttcttttattcgttcttcagaaaccaatcttcatggtttactaccatgacttatataccaatgtatctttaggtgactacttccgcgtcatgtggcacggattgcctctggatttatctcttgcaggctacctgaccgctatccccggcttactgctcatcgcctccgcctggaccaattcatccatactccgccgcatccggcaaggatacttcggggtaatcgcctttatcatggcctgcatttttatcatcgacctgggattatacggcttttggggattccgtctggatgccacccccgttttctatttcttctcttcccccaaagatgctatggcaagcgtcagcttttggtttgtactattgggaatcttatctatgttgatctatgcagcaattttatactttattttctattgcgtccttatccgggagaaaaagcccctgaaaattccttatcgacgtcagaatgtctcgcttgcactccttttgctgacagcggcacttttcatccctatccggggcggattcagcgtatccaccatgaatttgagcaaggtatatttcagtcaggaccaacgcatgaatcatgcagccatcaatccggcattcagcttcatgtattccgccacccaccagaataatttcgataagcaatatcgcttcatggacccgaaaatagccgacgaattatttgcagagatggtagacaaacctgtcgcagcaacagacagcatcccccaattattgaatacacaacgtccgaacattatttttattatccttgagagtttctccacacacttgatggaaactttcggaggacaacccaatgtggctgtcaacatggataaattcgcaaaggaaggcatactattcagcaacttctacggtagcagtttccgcacagatcgcggactggcatccattatcagcggatatcccggacagccaagtaccagtatcatgaaatatcccgaaaaaacagacaaacttccttctatcccccgcagcttgaaaaacgcaggatataatctggaatattactatggtggagatgccgattttaccaatatgcgctcttacctggtatcttccggcatcgagaagattatttccgataaagattttcctctgtccgaacgtacaggaaaatggggagcacaggatcacgtcttattccaacgcctgatgaaagacctgaaagaagaaaaacaaaaagaaccgtttctgaaacttgtacagacatcaagcagccacgaaccattcgaagtcccgttccacagactgtacgacaaaatcctcaattcttttgcctatgccgatagttgcgtgggagatttcgtgaaacagtatcaagagacaccgctatggaaaaatacactgtttgtactcgttcccgatcatcagggtgcatatccgtatccaatagaaaatccgctggacggccaaaccattccactgattttaattggaggtgcaataaaacaacccttggttgtagatacttatgcttcacaaatagacatcgccgctaccctgctcgctcaactaggattgccgcatgatgaatttactttcagcaaaaatatcatgaatccggcgtcacctcatttcgcatactttacccggccgaattatttcggaatgattaccgccgataatcaattggtatataacctcgatgccaatactgtgcaactggacgaaggtactgccaaaggagccaacctggaaaaaggaaaagcgttcctgcagaagctctacgacgacctggcgaaacgctaggaaatgagttatattgaatatttataaagtaatataggacaattttctattctttattgtatatttgcgacattaaaaatagatcaataaagcctgatgatacacaccggaattgtccaatatctttcggagatagatacaaatatcttcttgtctttcaatggtatacattcccctttctgggattatttcatgagttctttcacgggtaaattcatctggattcccatgtatgccactatattgtatattttattaaaaaacttccactggaaagtagtaatgtgctacgtggctgccattgcactgactatcacctttgccgaccagatgtgcagcagcatcattcgtccggtagtagcacgtctgcgtcccgccaatccggagaacccgattgtagatctagtatatatcgtaaatggttaccgcggaggaagctacggtttcccatcgtgccatgccgccaattcattaggtcttgccatgtttgtcatattcctgttccgtaaacgttggctaagcattttcatcctgacctgggcaatactcaactgctacacacgtatatatctgggtgtacattatcccggtgatttactcgtaggaggtattatcggaggattcggcggttggttgttctgcactatcgcccacaaagcagccatctatctgaaaccttccacccgcacgaagagaaaagaaataaaacaatggtcagtcactatttatgtaggattactgactatactcggtatcgttctatactccactattaaaagttggtagaacacaacatatttcgaactaaaaagtaaaagcctgacaccgttatccgatgccaggcttttacttttttatccgggtttatcaagctttcttgatataatcaacaatccactgtcctacttcttttgttccgtacttagcaccgtcagccacctggatttccggcgtacgtacattctcatccaaagaagcatctacggctttacgaatcaatgcaccctcttctttaaggtcgaaatactcgaacaacatagctacagaaagaatctgtgccaacggattagcaatattcaatcccttagcctgcggccatgaaccgtgaatcggttcaaataccggagtactttcacctgtagaagcagaaggaagcaagcccatagaaccactgattacagaaccttcgtcagtcaggatatcaccgaatgtattttccgttaccatcacatcgaagaaagcaggttcctgaatcatcttcattgcagcattatccacaaacatataatcagttgtcacttccggatagttcggagccatttcctgtgcaatctgacgccacagacgggaagaagccaacacatttgccttatctaccacagtcagatgttttctacgcttcatcgcatattcgaaagccaccttcaaaatacgttcgatttccggacgagtataatagttcgtatcatacgccttatcattatcctggtacttttcaccgaaatacatacctccagtcagctcacggatacagataaaatcggcattctctaccaactccgcacgcaacggagatttgtggatcaggcatttgaatgtctgtaccggacggatattagcgaaaagacccagtttcttacgcatagccagcaaaccttgctccggacgtaccttggcagtaggatcattgtcaaatttcggatcacctacggcagagaacaaaacagcatccgcctctttacaaacctgataagttgcttccggaaacggatcgcctactttatcaatcgcatcagctccacagattgcatattcgtaacttactttgtgaccaaacttctcgcaaacggcactcatcacatctacaccttgcacagagatctccggtccgatgccgtcgcctgctaatacagcaattttaaaatccataatcgtttattcttctatttatatattcttataaaaaacattcttcgggcaagttgtttctcacttgctcttctcgtattcatcttcgatgaggttcaacatcttcatagtagccttgatggcagcctctgtctggtcggcatcgagtccgcgggtacggaacacctgctcatcataactccacgtgataactgtctgcacaaatgcatctgtacgtccaccgggagggatggttaccgcataattggtcaacatcgggaatttacgtcctaatgtcaccttatatattttacgcagcgcacgaacaaaagcatcatactgaccatcgccgcctgaactctcttcgtactcttttccgttgatttctatcttcaacgttgccatcggtttcaacccatgagccagattcacaaaatagctcttcagtttaaccttctcacccactgctccatgtttcaacacatccgaaacaatgtacggcaaatcttcctgtgtaaccagttctttcttgtcgcccaactcgatgatgcgttccgttaccttgcgcatagcatcttcgtccagctccaatccgagatcttcgaggttcttacggatatttgctttaccgcttgtcttacccaatgcatattcgcgcttgcggccaaaacgttcgggaagcaaatcattgcagtagagattattcttattatccccgtcggcatgcactccggccacttgcgtaaagacattctcacctacaatcggtttattggcaggtatcacaattcccgaataagactccactacccgactgacatcattcaaacggctttcgtcgatatttgtcaccgcattgaaatggtctttcaggatagcctgcacacttgcgagaggagcatttcctgcccgttcacccagcccattgatggttgtatgcaatcctttgacaccgcttaataccgcggcaaggacattactcacagccaaatcataatcattgtgcgcatggaaatcgagatgagtattcggataacgtttcttcatcttccgcatatactctatcacttgcaaaggattcaagatacccaacgtatcaggcaacataaaacgcttgacactcgtctctttcaatccatccatcaactgaaatacatattcgggggaatctttgataccgttgctccaatcttccagataaacattgacggttatatcctgttcgtcggcataatgcaccacacttatgatatccgccagatgttcttccggtgtctttttcagttgttgcgtacaatgcttcagtgaacctttacaaagaagatttatcacacggcagccggtacgctgaatccaatcgacagaagtatgcccgtcgacaaagccgagcacttccactttatggagcagactacgacgggccgcccagtcgcaaatcatcttcacggcttcaaactcaccgtccgacacacgcgccgaagcaacctccacccggtctacctttaaatcttctaacagtaaacgggcgatcattagtttctcatgaggcacgaaagatactccgctggtttgttcaccatcacggagcgttgtgtccatgatttctattttcacgccttcttttcccattcttctattttatctttattgctcaacaagaaatcgatatcgtccaatccgttcatcaaacaaagtttcttgtaagcattgatttcgaaatgttcacttttacctgtcgccttgttggtgatggtctgttcgggaaggttcacttccacttccatcttcgggtccgcttctatcgaatcaaacaactcctgcagaaactcctcggtaacaaccaccggcagtacaaagttgttcagctcattattcttatgaatatcggcaaagaaactggataccaccacacggaaaccatatcctgcaatagcccaggcagcgtgttcacgactggaacccgaaccgaagttttttcctgccaccaatatctgtccactgtaagtaggattgttcaacacaaaatccttgttcagggaaccgtcagcattataacgccagtcacgaaaaagattatcaccaaagaatttttcttcacgagtggttgctttcaggaaacgtgccggaatgatctggtcagtatctacgttttctaaaggaagaggtacacaagtacttgttattatattaaattttgtcttagccatcgtcttatttacaatttaatgatttacgaattacggttaaattacatcagctctctcggatcggtaatcacacctgtcaccgcagcagcggcagctaccagcggactagccagcaaagtgcgtgcaccggggccctgacgtccttcgaaattacggttgctggtagataccgaatactttccggcaggaatcttatcatcgttcattgccagacaagcagaacatcccggctgacggatagcaaatccggcttccgtcaatatcttgtcgattccttccttacggatctgtgcgtctaccatccatgaacccggaaccagccatgcaattacattctccgctttcttacgacctttcacgatggaagcaaatgcacggaaatcttcaatacgaccgtttgtacaagcaccaaggaatacataatcaatcttcttacccaacaaaaattcacccggttggaatcccatatactccattgatttcttgaacgaaacctgtgcagcttcactcattccttccatagtaggaatatgctgtgtgattcccatacccatacccggattcgttccgtaggtaatcatcggttcaatatcagccgcttcgaaacggacttctttatcaaacacggcatcatcatcactcttcaatgtcttccaataagccaaagccttgtcccatgcttcgccttgcggagcactttcacgtcctttgatatattcaaaagtcacttcatccggagcaaccataccaccacgcgcacccatttcaatagaaaggttgcaaagggtaagacgtccctccattgtcagattgcggatagccgaacctgcatattccacgaagtaacccgtagcaccactggtagtcatcttagacatcatatacagagccacatcctttgcagtcacccctttacccagttcaccgtctacagtgatacgcattgttttcggtctcgactggagaatacattgtgaagccagcaccatttccacctcgctcgttccgataccgaaagcaatcgctcccattgcaccgtgagtagaagtgtgagagtcaccgcaaacaatcgtcattcccggcaaggtcaaaccacgttcgggacctaccacatgaataataccattcttcggatgcatcatgccgtagtgtgtcagaccaaaatccttcgcattctgcgtcagcgtgtccacctgcgttttagaaatcggatcttcaatctccttatcctgatcgtgtgtcggtgtattatggtcgggcatacaaaataccttttcgggacgcaatactccgattccacgttcacgcaatcccgcaaaagcctgcggactagtcacttcgtgacaatataaccgatcaatataaagctgtgtagggccatcttccacagtagtcaccacgtgggcatcccatatcttatcaaataatgtattcatctgtttatttactattttactaattactatttactctttcaatcaatctctgtaataccaaaccgactgtcaatctcttttttacgatttgaatttgttaatacagtcgatgtaggcttctaccgaagcagcaataatatctgtattggcaccaaaaccataataaatctggttatcgtattctacctgcatgtgcactttacctacatcatcacttcccttactgatagcctgaatagtaaactctttcagagtcatgtggcgttctacaatctttttcaatgctttgatggcagcatctaccggaccattaccactggcacaagcttcaaacttctcaccggcaatattcaatcccaaactagctaccgaacgaacaccgacaccactcgtcacctgcaagtaatccagtttgatacgatggttctggctacggtctgcacctgccaatactaaaatatcatcatcattaatatctttcttcttatcagccaacttcaggaactcatcatataccttatccagtttttcctgatccagatccactcccaatatagaaagacgatttttcaatgcagcacgtccgctgcgggcagtcaatacgatagagttatcatcaatacccacatcatgcggatcgataatctcatacgtctgtacatttttcaatacgccatcctgatggatacctgaagagtgtgcgaaagcgttacgtccaacgattgctttattgggttgtaccggcatattcatcaggctggataccatacggctggtcggataaatcttctgcgtattgatattggtttgaatatctatttcgtgatggctcttaataatcatggcgatttcttcgagagcagtatttcctgcacgttcgccaataccgttgatggtaacttccacctgacgcgcaccgttcaaaacaccggctatcgtattggcagtagccatacccaagtcattatgacagtgagtagaaagtatggcattatcaatgccgtctacatggtcaaccaagtattttatcttggcgccatattctgaaggcaagcagtaacctgttgtatcagggatattcactacggtagctcccgctttgatgacagcttctaccacacgtgccagatattcgttatccgtacggcctgcgtcttctgcataaaattccacatcgtctacaaaacggcgggcatatttcacagcagctactgcacgttcgataatctcttcacgattcgaattgaatttatatttaatgtgcgaatcagaagtaccgataccggtgtgaatacgtttatgtttagcaaatttcagtgcatctacggctacatcaatatctttttgaactgcgcgggtcaaagcacagatagtaggccaagtcaccgcttttgaaatctcaattactgaattaaaatcccccgggctcgaaatggggaatccggcttcaatcacgtctactcccaacgcttccaatgcctttgctacctgaatcttttctactgtattcaactggcatcccggaacctgttcaccatctctaagagtggtatcaaaaataaataacctattgtccatattcttatgtatattatataattattagcattaaaaaaagcctttcacacttggaagtgagaaaggctttcgtatattttcatttatacacatttacgcgcagcactcacttccactaacctttgatagtagaataataataccgcatagtagaatatgtataaacatctgattcatttcttgtctcttttattagtttgacggtgcaaaggtatggattatttctttaccaccaaataatacgttacttttttatcgaaaaaaatatcatttcataagttaaagccgattattagcaaaaatgtatcacgaataaagcgatatgtttattaaaacagaaagagggagtagaatgttgaaccattctctccctctccttctttattgttctaaatcaatagattacttcttatcgcaacattctttcttttctgcgcaatcagcttttttgtcgcaagcagtagcacaagagtccttagcctggcagcaagaatcagtttcaacaacagcttccactgtttctacagttgtctcttcaccttcagaagcagcgttagtagttttgttaccagtacaagacatcattgcaaaagaaaatgttactgctacagcagccaaaaataatttagttttcataccttttaaatttgctttaaacgtttaataaaataattgtcggtcgcaaatatagcacttttttcgcaaagtaccaaatgacagaagccccttgattcaaaatgaatcaaggggcttcttaaaaaacggcggctacctactctcccactgttacgcagtaccatcggcgtgacgaggcttaacttctctgttcggaatgggaagaggtggaaccctcgtgctataaccacctgaagaaggttatgacatgatgaaaagtaaaatttcagtgtctagaaagctaaacgtatatacccaaccggtacatgtccgaaagaaagtgaacgggcaattagtaatgctcggctttgatgttaccacctttacacctgcatcctatcaacgtcatcgtctttgacgaccctaagaaatctaatcttgtggctggcttcgtacttagatgctttcagcacttatccaatcccgacttagatacccagcaatgcacctggcggcacaactggtaaaccagcggtcagtccaacacggtcctctcgtactagtgtcagagccacgcaaatttcatacgcccacgatagatagagaccgaactgtctcacgacgttctgaacccagctcgcgtgccactttaatgggcgaacagcccaacccttgggaccttctccagccccaggatgtgacgagccgacatcgaggtgccaaacccctccgtcgatatgagctcttgggagggatcagcctgttatccccggagtaccttttatcctttgagcgatgtcccttccatacggaaacaccggatcactatgctctagtttcctacctgatcgacttgtctgtctcccagtcaagcgcccttatgccattacactctacggacggttaccaatcgtcctgagggcacctttagaagcctccgttacacttttggaggcgaccaccccagtcaaactacccaccaaacagtgtcctcgcaacaacgagttagaactcaaataatcaaagggccgtatttcaacagcgactccacaaatactggcgtacctgcttcaaagtctccggcctatcctacacatcaattacccaaattcaatgttaagctatagtaaaggttcacggggtcttttcgtcccatcgcgggtaatcggcatcttcaccgatactacaatttcactgagctcacggttgagacagtgtccagatcattacaccattcgtgcaggtcggaacttacccgacaaggaatttcgctaccttaggaccgttatagttacggccgccgtttactggggcttcaattcaatgcttctcttgcgatgacatctcctcttaaccttccagcaccgggcaggtgtcaggctgtatacgtaatctttcaatttggcacagccctgtgtttttgttaaacagttgcctggacctattctctgcgcccaactctcgttgggaccctttatcccgaagttacagggtcaatttgcctagttccttaaccgtgaatcactcaagcgccttagtatattcaacccgactacgtgtgtccgtttgcggtacgggtaccttaaagattaagtttagcggattttcttgggagtatgcttacacgcactattaccttattccgaagaatttggtatactatcaggttcgactcttatcccggatttgcctgggataatcaacatctacacccttcaacggactattccgtcagtccgcggcgctgtcactcctccgtctccacgtcactctttaaggtagtacaggaatattaacctgttctgccatcggcctcaccgttcggctgagccttaggacccgactaaccctgatccgattagcgttgatcaggaaaccttagtctttcggcgagggggtttctcaccccctttatcgttacttatacctacatttgcttttccacacgctccagcaaagctcacgcttcaccttcgacgcagagtggaatgctcccctaccgatcattactgatcccatagcttcggtaaattgcttgatgcccgattattatccacgccaaactcctcgactagtgagctgttacgcactctttaaatgaatggctgcttccaagccaacatcctagctgtcttagcaatctgacttcgttagttcaacttagcaattatttcgggaccttagctgatggtccggattcttctcctttaggacatggaccttagcacccatgccctcactcctgggatcgaactactgcgcattcggagtttatcaagacttgataggcggtgaagccctcgcatcttatcagtcgctctacctcacagtagtaattcccaaggctgcacctaaatgcatttcggggagtacgagctatctccaagtttgattagcctttcacccccaccctcagttcatccggaagcttttcaacgcttatcggttcggtcctccagttagtgttacctaaccttcaacctgaccaagggtagatcacttggtttcgcgtctactccttccgactaatcgccctgttaagactcgctttcgcttcggctgcggatctcaagatccttaaccttgccggaaaaagtaactcgtaggttcattatgcaaaaggcacgccgtcactgtttacacagctccgaccgcttgtaggcgcacggtttcagggactatttcactcttctattcgaagtgcttttcacctttccttcacagtactggttcgctatcggtctctcgggagtatttagccttaccggatggtcccggcagattcacgcaagattcctcgtgtcccgcgctactcaggataccactacgcttcatttagcttcgaataccggactatcaccgtctatggtttcattttccaaagaattcttctcactaaatttcttgcgacatcgtggtcctacaaccccaatattgccgtaacaacattggtttgggctaatccccgttcgctcgccactactaggggaatcattattattttcttttcctacaggtactaagatgtttcagttccctgcgttagcctcttgctatgcaagatgtcattccttcagaatgacgggttgtcccattcggaaatcttcggatcaaaggttatttgcacctgcccgaagcttatcgcagcttatcacgtccttcatcgcctccgagagccaaggcatccgccatgcgcccttgcttactttctttcaaacgttttattctcgtactggtattggtagtggaatgcttccttctatcaatattgcatactcgaacacgtacggtttgatatatacttttagctcttactaaaattttactttttgtacatcatgtcaaagatcgtttctctttttcagagatcgtggagaataacggattcgaaccgttgaccctctgcgtgcaaggcagatgctctagccagctgagctaatcccccaagaggttatcaagaattttgttttttagcttttagctttccctgttcctcattcttgagcttggtagtcccaggcagagttgaactgccgacctctacattatcagtgtagcgctctaaccaactgagctataggactagttcaaccttgtctacctttcgtctagactcggcttctttttctcttgtttatctctatctatacttctatagatggttgatctatatgttataaataaacaagtaccagtagtacaaaaaacagaacctttaaagtcttttagtggctgccacgttttgtgacagttacggcatcgctccagaaaggaggtgttccagccgcaccttccggtacggctaccttgttacgacttagccccaattaccagttttaccctaggacgctccttgcggttacgtacttcaggtacccccggctttcatggcttgacgggcggtgtgtacaaggcccgggaacgtattcaccgcgccatggctgatgcgcgattactagcgaatccagcttcacgaagtcgggttgcagacttcgatccgaactgagagaggtttttgggattagcatcctgtcaccaggtagccgccttctgtaccccccattgtaacacgtgtgtagccccggacgtaagggccgtgctgatttgacgtcatccccaccttcctcacatcttacgacggcagtctctctagagtcctcagcataacctgttagtaactaaagataagggttgcgctcgttatggcacttaagccgacacctcacggcacgagctgacgacaaccatgcagcaccttcacaacagccttacggctatactgtttccaatatattctgttgcaatttaagcccgggtaaggttcctcgcgtatcatcgaattaaaccacatgttcctccgcttgtgcgggcccccgtcaattcctttgagtttcaccgttgccggcgtactccccaggtggaatacttaatgctttcgcttggccgcttactgtatatcgcaaacagcgagtattcatcgtttactgtgtggactaccagggtatctaatcctgtttgatacccacactttcgagcatcagtgtcagtgacagtctagtgagctgccttcgcaatcggagttcttcgtgatatctaagcatttcaccgctacaccacgaattccgcccacctctactgtactcaagactgccagtttcaactgcaattttacggttgagccgcaaactttcacaactgacttaacaatccacctacgctccctttaaacccaataaatccggataacgctcggatcctccgtattaccgcggctgctggcacggagttagccgatccttattcatatggtacatacaaaattccacacgtggaaaactttattcccatataaaagaagtttacgacccatagagccttcatccttcacgctacttggctggttcaggctctcgcccattgaccaatattcctcactgctgcctcccgtaggagtttggaccgtgtctcagttccaatgtgggggaccttcctctcagaacccctatccatcgtagtcttggtgggccgttaccccgccaacaaactaatggaacgcatccccatcgataaccgaaattctttaataaaaatatcatgcgatattcgtatgctatccggtattaatctttctttcgaaaggctattccggagttatcggcaggttggatacgtgttactcacccgtgcgccggtcgccatcttcagtttgcaagcaaactaaaatgctgcccctcgacttgcatgtgttaagcctgtagctagcgttcatcctgagccaggatcaaactcttcattgtaaaagtattttttatcatcccttaggatgacttttttgctctgttcaggacgccgtaaatttattgaccttattcaaatacctattagtcttaattgtatcactacttcataagacaagtattgacggttctatttttttacttgtactacttgtattgtttatcaatatttcaaagaacttgttgctttcgttttaaaagcgggtgcaaaggtaagggctttatttttaactaccaaactttttcggaagtttttttagtttttctttttacgctggtttctctggctctctatgcgaaagggaaagaaggtatgaaagaataactcttgccaattttctttgcgaatcggactgcaaagataagaactttagttattataatccaaactttttcggaagttttttgttcttttctctaagtgagattccactttttcactaagtcaatttgtcaaggctttcttctcttggaaagcgggtgcaaaagtacgcccttttggtatacactccaaatatatcaaactattttttctaattatttttgaatacatttgctaaagtgctgatgcataacgatgttgtagaacatattttttatgtatagggaaattgtgtgcggaaacgacgagagggatacacattattatatcacacgcgggcgcgtaggtgtgccgaggagcagtttgtattagggagcaattaaagaatcagttcattaaaataagaggaaagaaagatagatataaggatagtggttttatagtggattccattccttagtttgattcattaatatgatacttgtatgagaatgatgcgtagaaacttcactttgctgaaaaggatttttctttttcatttctcatgttctcataatatacataataatcatctgtgaatcaaatagataatactatgagaaataaaacacaaaagggtatttctcatagtattgccatgatttagtccgtaaaatcgagcatttctcatagggtttaaactatttctcatcttattctcatactccgtctatacattttactcatttctcatacagtataattgtagtttttccggacttttgccggatttacgattactcctttccttcttcggttttattaagcaacttcttgctatttactactttcctgtatgttattcaccttatacctttatgtttttccctaatcattgttatttcttcctaccactattcgtatcgttacactctagtgaacagatcgttgcactggagtgaacggttctatctactctagtgaacagacctttccactctagtggaacgattcagataccggtaggaaaacatgagaatatctactccatacactttcataaacgctttataatatattattaatcaatacataactgaatatgtagcattgaatctattacaattaattagcctctttgccctacgaaagattatgagaaatgccttgaaaagctatgagaaatactttgttttgtggacaaaatgctggtaacactatgagaaataccctttcttcttttatttctcatagtgttatataactgatttgaagattgttatcacatatattatgagaacatgagaaatgaaaatgaaaaatcatttgcaggagctttgatataaatacaggaaactatccacgcctatgtttttcgagaaaatgataaatcggttcagttcatatcatagatttatttcgtacctttgccattctatttatataaaaagaaaaaatgagtaaagaatgcacactcgcagatttcacagatatttttgattactccacaggatggttcagcgacagtagcatttgtagtctattctatcagatattcaaacgattcccttccatgaaaatggtaaaatataaagtaaaccaggattttctgaaagaaatcaaggaactttatcagcaagatgacgcgttcgatatattcgagcatgtgtactgcaatcattttgaaaatgaaaaagaagaagaggaggaagaagaagataatacatctacaaaagagttatacgactgtatcgttatctgcaaaaagaatttgatgatcggctattttgataattgcgtaaagattgtctattccaatatcgacaaggaggaaatcaatcagatcaatcagatttgcgaaaaccacaagaaggaaaatgagaaacttaacaatctatttatagtaacatactctcataactacttcagcctgaaacaatcgcaagttaatgaacctgctattcagattgatcgtcactataacgatgattttgttcccgtagctgccgagatcgaaaactttctgctggaggacaacaaaagcggattaatcattttgcatggaaaacagggtacaggaaaaacgacttatatccgccaccttatcaatcttggaaaaaagagaatgatctatatgagtggagacctggtagataaactttcggatccgagctttatcactttcatccgccaacaaaagaattctatcttcatcgtagaggattgcgaagaactattgtcaagccgcaacggaggcaaccgtatgaatgccggcttagtcaacatactgaatattagcgacgggctattgagcgatgaattgtgtatcaaatttatctgcacctttaatgctccattaaaagatatcgacgaagcattgcttagaaaaggacgtctggctgcccgatacgagtttaaagacctgactactgataaggttaatcaactaatcaaggaagaaagcctggatattcccgaacagacacaccccatgacactggctgaaatctataattacgaaggaatggatttctcccagggaagaaaacgggtaggattctaaagatattctccggaatagaattgccagagaaaaaacaggcaattattattgtggaatacaagtatataaattttatctacatccggacacgattcgacatttttatacgtttattatacgttaaaagagttgccctattattgagcaactcttttaaaccttaattccgcaacactattataaattaaactttttaagtacctgagcaacaaaaagttgctcaggattttgccatgtcagaattttcacttatcttagtgttgcaaaaaaaacaagagaatccgacgatagacatggcgaagatacaaattaaatctgagagactcactccttttgggggattattttcaatcatggagcaatttgactccacattatcatctgtaatcgactcaaccctcggtctaaggtgtagatcgttcggttatcagtacagcgaaatcatccgttctctcatgagtatctacttctgtagcggttcatgtattgaggatgtcactactcatttgatgaaccacctctcgcttcatccgacacttcgcacttgtagctctgatactatcctcagggcgataaaggagttgacgcaagaaaacatttcatacacatcagatatgggcaagacctacgatttcaatacggctgacactctcaatactttattgctcaattgtatatttgcatctggccaactgaaagagggtgagatgtatgatgttgatttcgaccatcagttcatagagacagagaagtatgatgcaaagcctacatacaagaagttccttggttatcgccctggcgtggcggttattggcgatttgatagtcggtatagagaatagcgatggtaacacaaatgttcgtttccatcagaaggacacgctgaagaggttctttgcgagatttgaacagaatgggctcactatcaatcgcttcagagctgattgtggatcatgttccgaggaaatcgtggaggaaatagaaaaacactgcaagtccttctatatccgtgctaaccgctgcagttcgatctacaatgacacctttgctctcaaaggctggaaaactgaggaaatcaatggcattgagtttgaattgaactctatccttgttgagaagtggaaaggtaaggcatatcgacttgtgattcaaagacagaaacggatggatggtgtgcaggatttttgggaaggagaatacacataccgttgtatcctgactaacgactatgattcttccgtaagagaaattgtcgagttctataaccttcgtggaggaaaggaacgtatcttcgatgatatgaacaatggtttcgggtgggacagattgcccaaatccttcatggcagagaacacagtgttccttcttcttacagcacttatccgtaacttttacaaggccattattcaaagacttgacgtaaagaagttcgggctcaatgcaacaagtcgcataaaagcgtttgtcttcaggtttatctctgtaccagccaagtggatcaggacatcaaggcggtatgtgctgaacatctatacctgtaataatgcttacgcagatgttttccagactgattttggataatgcctacaacttatgggaatgatattgtgtattgcctcaagtcacattgtggggtaaggggatattgtaggcagaagtgggtgcttcaagttcaaattatctgcaaattcagtaatgagaggacgtgtaaacgcaataaggacgttcaagggcttagttgcggatttgaggttaaatataaaacttcttaagttcaaacttaacttgtgataccttatacggacatattcttacttataagttaacggaacttcaaagatattcactcacaaaacctgctattatccaaagctgaagggaaaagcgctttcatcagataaagcaattaatccatttttccgttggatacaaattttgttctctcgtgccaaccaaccggcggccaatgctgtactttctacgcttaggtttaatcttctcgccaattcaggtattgaaatttcaccaatttctttcagggcataccagacctttccggcattgttccctacaattgttttatccatggctatttttattaataattcggttacaatataatcattttaataatagtttataacaaaaccggcttttttattttagtttttgacattatttaaaacaagaaaatcaatttcgcaattaacggttaaaaatttggtcatggttcacaccataacaccactgtaaggtacattatatatcaaaataaattctcaaaacaggtatagggcaaccatagaaagaaaatagaaagttgacatttccgcaatatcggacaagtcatttcgcttttttaccaatacctttgcgaagtgaaataccaaaattagttatgcaacagaaaaaaacaacgaaagaggaatatcaaaagtgcgtaaatgttgtagtggaatacatcatccaacatttaggagaagatattgatttaaaatctctggccagaatttcaaacttttctcctttttactttcaccggatcatgaaagcttttctcggtgaaccgattggtacgtttattgtccggacgcggacagaagctgccgcacgcctactccgctactcggatattccgattgctgacatcgcctaccggattggttacgcatccccttcttcattatcgaaagtgttcaagcaattttatggcatttcacctttagaatatagaaacaataaaaactttgtaattatgaaaccagcgattatcaggccagacctggaactaaaaaaagagatcagaaatgtctccgaacggaatgtgatttatatccgccttacaggcgactacaaactgaatgattacggtggcacttggggccgtttattccaattcatcaaagaacaaaaactgccgatgggagatttcagcccgctttgcatctaccacgatgatccgaaagtgacgccagccgagaaactgcgtacagacgtatgcatggtaatgcctgtaaaggttgcccccaaaagtgatgtgggattcaaggttatcccagccggacgttatgctattttcctttataaaggcccgtatgacaatctgcaagctgtgtacgatacgatttacggaaagtatctgcccgaaatggaatgtacgatacgtgatgaagccagtgctgaacgctatctgaacaatccatgtgacactccccccgaagagttgttgacggagatctatattccggtagaataatccggataaggggacgaaggaacagcagtcacttccagacaggctgttccctcttccctacctgttatttttcagcatagacgccaatcctgtttccttcactatccgtgaatacggcaaaccatcctttatcgtctgcctcaatctttgttttgggaatgacaactttccctcctttcagaagcactttttccaatgtttgttcaatatcctcacagttgaaatggataagtacgccatgcgttgaaggaagaaagtcgaaatttgaagtataagaaatagcaccgacggtttcaccttcttccgtgaaacaagccattttctctgtttcacattcaaaagtcggaagttgcacccccaacacagtttcataaaaatcgacagcccgacggaaatcggtagcaggaatctcaaaaaatgcaattaattttttcatctcgtttcttttttatggttactactaagcctttgcaaagacattgcaaaagtagggtaacacgaggaagcccgatagaaaaaaagagacatctttagagttcagagaaataatcggaataaggggcgcatacagaaagatactccgcaggggtataaccggaaaagagtttgaattcctttatcatgtgagactgatcggaaaagccacattcataagccacttgtacaaaaggaatcgtagcatcctgttgcagcatggataacgcccgttgcatacggataatacgaataaattccttgggagtagtgccgacataatcggcgaagatacgcccaaactgcttactgctcaaacaggctgtttccgacaaatgagaaatattgatttgcggccggaggtttatttcatgaaagacagcagacatccgcttgagattatactcgggaagagtgtataaacgacgaagaaaaaactgctctatcaaccgaatacaaactgcattatcagaagtatccgtgacctgtttcactaaatccgacagttctacatcttccatcgcatcggtatctacagtctgcccatggaacaaatgactgggtatatgaaacaatgcttttaccgcataaggttgaaaaacaacagtaatcatctctatcctgcctgtagacatcacatccgagaaaccgaccgattgtccggaaataaaggattggggttgcagctccgactcgcccaacaaaagaagttgtttccctttatggaataccagttgcatgcagccaataggcagagtccgttcggagacaggagctattgagtcgtcttgcaatatccagtaatgccgtatatagggagccagtgcaaaacagggttttatcagttgaaatgattgcatataacaaagatattatttcttaatccaaatgcaaaagtaaaactcctgtttaaaaggggatagtaaaaaaaggacttctttgcttaattaaaaaagcatcccctgcttgaagaaacatgattgcaactcattcaaacagaggaagaattctttagataacggaaagtccatattcgtaggcttccgacatcgcattgtaatctgcatcggaatatgcgcctttatctcttgctttctgcatatctttcataaacgattccacagaagacaggaagctataataattcttttgctcttcatcatagcctgtgacagtaggaagtttctttgcagcttcgagttctttcttcaattctgccatcttcacatcaatgcgagcaccctccagtacatgtttgcgggaataaagattcattatgctttgcacagtgccggacatcttacgcatagccatgatttgatctttcaacggttcgtcggcaagaagttctttttcagcctgttccgtgagagggcttagaatatcaaaaatcacttgtttatattcggacatttctacacttagccgatagttttcatccaagagcttgccagccttggctgtctctttggcctgcttgtaagagagaaacttattaaaattatcatagaattgcgcccgtgcactgaaaagtcctctataactctgcttcagattctgacggacttgtatattaaagtaatctcccggatccatcaattccgcagtgtctctggcagatacttcaggcggtgctatcggagatacttcaggaacttttcctgtctgttccatatatcccaagaccgcatttacgtcttttgcattagctacatgcctcaacacgatgagcgatgtatgataatagtttatcactttactggcattatccaattcctccggagtgacggaggacgcagcctgtttcttgtttcctcccgaacaggaaaccaataagaaagcacctatcagtgctccaaacaataagatattcttcttcataataatggttagtttattgagtctttcgtactataacaataaaaatcgttttttgttatagacaaacaatgcatattcgaaaagtgttctctatatgatattaacttaaaaataaaacaaatatggaacaatcatttcaaaaaggagttgtgctccatttggcttctctcattgaatatactgaaggaggcgttatcagcaaacagttaatcaaaagtccggcaggaaatatcactttattttcttttgataaaggagaagggttaagcgaacatcgtgccccgtttgatgcgctcgtgcaggtattggaaggggtagtgaatattactgtaaacggaactctgttcaccgtaaaagcaggagaaagtatcgtatttccggcgaatgcgccgcatgcccttacagcagtggagagatttaagatgctgttgactatgattaaggaataaacaatcatagtgtataaaaacaaaaaatggctactcatcacgagcaaccaatcttttgttaaccttaaatctaatacttatgaaaaaaacactgtacaaaggtaccatatttcaggtaaatagcaaattctagagcctaaacagcccatattataacagggtttaatactctgggaagcgcattaacatttcagacttcacacgttaacatttaacatattcattcacactagttacttcttgggtaagtaagaatacaaaaaagagggaatcattgaaacaacatcgtctttttttttgtaactttgaactatgataatcagtgccagccgccggacagatattccggcattctattcccagtggtttttcaaccggattaaagaaggatatgtattagtgcccaatccatatcatccgaaaatgattagcaagatctctctatctcctgctgtagtagattgctttgttttctggaccaagaacccggcacctatgctcaaccaactggagaaattgcaggattacaactattacttccaatttacacttaacccctacggagaaaagccggaaaatcatttgccctccatcgataaacgaatggatacctttaaaaagctggctgataaaatcggcagggaaagggtgatctggagatatgatccgatactgacgaacgaggaatacaatgtttctttccaccaggaagcatttgcccggattgccgacgaactcaaagaccacactgccaaatgtatgctgggattcatagatcattaccagcatatccggaactcagtacggttattcaacatccatccgctgactcaagaggaaatagaagaaatggctgtctcctttaaaaaaacaatcgacgtttatcccgacatacagctggatacttgtactgtaaaagtggatttaagacatttaggtattccgagcggcctgtgtattgataaggatctgatagaaaagatcatcggttatcctatcctcgcccaaaaggataaaaaccagcgtaacatctgcaactgcattgaaagcattgatatcggaacttatgaaagttgcctgaacggatgtatttattgttatgccatcaaaggcaattataacacggcagtatataataggaggaaacatgataaaaactcaccgctactcatcggccatttatccgaagatgatatcgtaaaggaacgggagatgaaaagcctgcgggataaccaatattcgttgttttaatctcttcggtctgcagttgacttacaggcataaaaaaaggctatctatcccagacagccaatcttttgttaaccttaaatctaatactatgaaaaacacagtacaaagatacgtacttttcggttatctccaaattttgaggccaaagcagcgtatcttataacatggtttaatagaatcagagccgtattaacaaatgagtgggcaggcattaacatttaacagttttcttaaataatcagagcgtaaaactggaaaagatgcaaaagttttcgaatcgaacaccttatcttattaaagagagtttatgagggctaacaaattcctctgccagctgtttctaatagaaggtaatcatcaaattcccattatatgaacagattcgaaaataaagtagttgtcatcaccggtgccgccggtggtatcggcgaagcaaccacacgccgcattgtctccgaaggaggcaaagtagtcatcgctgaccattccgagaaaagagcggagcagcttgccaacgaactcacgcacgcaggggctgacgtgcgtcatgtctatttctccgccaccgaactccagagttgcaaagagttgattgatttttccatgaatgaatatcaaagaatagacgtactgattaataatgtaggaggaactgatcccaaacgtgaccttagcatcgaaaagctggacatcaactactttgacgaagcattccatctgaatctctgctgcacgatgtatctttcccaacaggtcattcctatcatgactgccaatggtggtgggaacattgtcaacgtagcttccataagcggacttacggctgatgccaacggtactttatacggcgccagcaaagcgggtgtcatcaacctgacgaaatatatcgctactcaaatgggaaagaaaaacatccgttgcaacgccgtagctccgggactggtacttactcccgctgcattggacaacctgaatgaggatgtacgtaatatcttcctcggtcaatgtgccactccttatctgggagaaccggaggatgttgcagctaccatcgcttttctggcttcgaacgatgccagatacatcactggacaaacgattgtggtggatggcggactgaccgttcataatccgacagtggcgttatcataaaacgaccggataacgtattatcggtaaagatgataggttattaaccggcaaccattacaaaaaataatctctttttccttgatgttaccgataggaaacatatctttgtgaccagtcagtaacaaaagtatcaaagtatggaaaaagagattactaaaaacagacaggctacggaaatgaccctgattacagccgtcaacgacatcattgaagaaagcggtttcgaggggttggggatcaatgcggtagcagccaaggccaaagtttcaaaaatgcttatctaccgttatttcaattcgctggatggactgatagcagcctacattcagcagaacgactattggactaatttcgatgaagagttaccggatcaggctcatttagccgcatttatcaagcagatattcaaaagacaaatcatgcggttacgggagaattatacattgaaacgcctgtatcgctgggaactgacaacggacaataagtttgtgaaagagttgcgcaacaaacgggaagagaaaggaatctggctggtagaggcagtcagcaaactatcaaaacatccgaaaaaagagattgctgctatggcttccatcatcaccgcagccatcagttatctggcattgctcgaagaaaactgcccggtctacaacggcctcaagattcagcaggaaagcggctgggaggaattggaagaaggcatcaatctattagtagacctctggttacaaaaacaactctaatcaaatgaataaaatgacaataatgggaatatggtttctttctctattgataaatagtggatgtaaccgggatttagtagaatacgacagtaacgatcttaaaatatctattgaaaaaggggaagagtggttgcataattttcctttgtttctaggcatcaacatcaaaaatccgccccagattgcaatctggactgaagacatggaagggaattatctgtccaccgtgtatgtgacacacaaaatagccactcaatcctggcaagcctccggcggtaaccgccgaaaggaagcgctgccgcattggtgttatcaacggggaatccaatatgaagacgggttatatctccctagcaaaaaggaaccgttgacggacggtatcagcggagctactccgaaaggtagttttaatgtgaagatgtcgccaaccgggaagttgaagaagtttatagtcaaaattgaaatcaatcattctacagatttcaatgatgcatatccgaaatcggccaaagaaggagacgccaattactccggtggaaaagaagggagcggacagcctgcccttgtctacgcagcagaagtggatttgacttccggcaagaaagaatttacagccaaactgatcggacacagtagcccggatggaagtaatggagatcttaccaaagatacttcttcactcacaactgcattgcatatcgttaaaagtataaccgtgtatgtgcaatagcagtagctaaccataatattatcaaactctatccttgcatcattatgaggaaatttatattcatctttgcgctgctatctttcatcactgtatgtgccgacggacaaacagacagcagacgtctctcttacactacatatatcgggacaggtttttctatgaatcagccttcttacacgcctttcaactggcaaatcgtcagtcactaccacatcagtcaacggtttgccatcggtgcgggtagcggactttctgtttatgaaaaactactcattccgctttatgccagtgcgcaattttatataacgaagcccaggagactgactccttatctggaatgtcatatcggtgggtcttttgccacagacagagaagcaaacggaggcttttacctctctccttccatcggtgcacaatttaaggtcaaccggaaatttaaactgaatttgatggcaggttatgaactccagaaactggaacggacaaagaaacaggaagatccgtatttccatacgacgtttaaggaagaattgtcgcaccattccattacgctgaaaatcggcttgacttattgaggtaactataataagagataaggaatttgccattgcaaacagaatatatattcagatcctgactttattcccccgaataaaaaaggcataattattaatgattaagtcgttatattattcaacaaatactaactttacgacgttataaaatataaagagcgaacgaaatgattgttaagacattactagataccgatctttataagtttaccacatcgtatgcttatatcaaactgtttccctatgcaatgggcacgtttagtttcaacgaccggaatgaaactcaatataccgaagatttcctgaaggcactcaaggcagagatcaagaatcttagtcagttgaggtttacggaagaggagctggaatatatgacgaaaaactgcagattccttccgagagtctactgggagtggttgtcttcttttcgtttcgatccgaataagattgatattcatctggatgaagcttgtcatctccacatcgaagtgactgacttgctttataaagtgactttatacgaagtgcctttgctcgctattgtctccgaaatcaaaaaccgtttctttggcaatgtagcagacatgaacgagattctttgcaagctgtcggagaaaatagaattgtcgaatcaacatcagcttcgcttttcagagttcggcacacggagaagattctccattgatgtgcaggaaacggttatcaagaagctgaacgaaacagcgcaatattgcaccggaacttccaactgtaactttgcaatgaaatatggaatgaaaatgatgggaactcatccacatgaatggtttatgtttcatggagcacagttcggatataaacatgccaactatatggcactcgaaaactgggtgaatgtttatgacggtgatttaggtatcgcactttccgatacatatacttccggcatcttccttagcaaccttagccgtaaacaagccaaacttttcgatggagtgcggtgtgattccggcaatgaatttgagtttatcgataagctggttgcccgctacaaagagttgggaatcgacgcgacaaccaaaaccatcgtattcagcaatgccctagactttacaaaagcattggatattcaagaatactgcaaaaacaaaatccgctgctctttcgggatcggtaccaatctcaccaacgataccgggttcgaaccttcgaacatcgtgatgaaactgacacaatgtaagatgaatgtcaatcaggaatggagggaatgtatcaaactgtctgatgatgaaggaaaacataccggcagccttgaagaggtacaggcttgcctgtatgagttacgactcaacagaaagcaataaaaataaagaaaagcaggaagtacctcaccggagaatactttctgcttttctttatgcatattagaagtatgccagacaaagacataccagcatagaatcagctacgcatatcattgtaacaaactatgcaataatcgtcaggatttgaatcctttcactgctctttccaatctttccaaaggtaattcgccggattgtctccagagctgttgtccttttctaaaaagaataaaggtaggagtcgactcaactgtatagaaatctgtaagggctggttcctgatcgatgtctaccaataccacttccaatgttccttccatcagtttcttaaattcttcaacaaccggtttcatacgttggcaatgaggacaccacgttgcataaaactctgccattacccaatcaccgttagccagtttctcctgatttctttcttcacgagctattttcttttctttcatacgaatatctccttttaattaattactatcaacctaacaatatcaggagaaatatagtttagaaaagtagcaaggttatacactaattaaagaatccttatttaaagataagcattgcacaaaaatgaaactttcgtgcaaaaaaggaacatcttatttaatatttatttatctttgccccccgaaatggttcagaatccgtatccaacggacgacgattaatagggaatcgggtgtaagtcccggacagtcccgctgctgtgaagctctgttcaatgtcttataattgaactaatttaacgccactgatgttaatcgggaaggcaaataagacaagagtcagtcagaagacctgccattttgtgtaagacgctcccctcctcgtgggttaggagaaagagcatcacttgttaagccccaaatcaaaaaaatactgtttttcgtcgggtggagtatgtccattagatgggaagacattaataagtatgtacttaattgaaaaaagtatgataaaaaaaatcttagtagccaatcgcggtgaaattgccgtaagggtgatgcgctcctgccgggagatggagataacgagtatcgctatcttctccgaagcagatcggaccgcgaagcatgtgctttatgcagacgaagcttattgcgtagggccggcagcatccaaagagagttatctgaatatagaaaaaatcatcgaagtggcgaaagcagctcatgcggacgccatccatccgggttacggcttcttgtccgagaatgctaccttcgcccgtcgatgtcaggaagaaggaatcatctttatcggacctaatccggaaacaatggaagccatgggggataaaattgctgcccgtatcaaaatgatcgaggcgggagtacccgttgttcccggcacacaagacaatttgaaaagtgtggaagaagccatagaactttgcaataagatcggatacccggtgatgctgaaagcttctatgggcggtggtggaaagggtatgcgcctcatccacagtgccgaagaagtggaagaagcttatactactgccaagagcgaatcgttgtcttcctttggcgacgacacggtttatctggagaagttcgttgaagagcctcatcatatcgagttccagattcttggtgacaagcatggaaatgtcattcatctatgcgaacgcgaatgttccgtgcaacgccgtaaccagaaaatcgtagaagagactccttcggttttcgtcactcccgaactacggaaagatatgggtgaaaaggcggtagctgcggctaaagcggtgaactacatcggtgcgggtactatcgaatttcttgttgacaaacaccgcaactattatttccttgagatgaacacccgtttacaggtggagcatccgattacggaagaagtgattggggtagatttggtaaaagagcagattaaagttgccgacggacaagtgcttcaactgaaacaagaggatatccggcaacgcgggcacgctatcgaatgtcgtatctgtgccgaagacactgaaatgaatttcatgccaagtccgggtatcatcaaacagattacagagccgaacagtatcggtgtgcgtattgacagttatgtgtacgagggatatgaaattccaatctactacgacccgatgatcggtaaactgattgtatgggctaccaaccgcgaatacgctatcgagcggatgcgccgcgtactccacgaatataagttgaccggtgtgaaaaacaacatcagctatctgcgtgccatcatggacactcccgatttcgtggaaggtcactatgatacaggattcatcaccaagaacggcgaatatctgcaacaacgcatcatgcgcaccagcgaacattccgaaaatattgctttgattgccgcctatatggactacttgatgaacctcgaagagaacaacagcggtatggctaccgacaaccgtcctatcagcaaatggaaagagttcggactgcacaagggagtgttgagaatctaattttaacaaagagaattcaattatggaaattcatataggaaaccgtgtggccgaagtagagttggtcagcaaagaagataacaaggtggtgcttaccattgatggaaaaccgtttgaagcagatgtagtgatggcggaaaacggcacttgcaacatcttgatggacggacgcagttcgaatgcacagctgattcgccgtgataacgggaaaagctataaagtgaatacgcattatagcagtttcaatgtagaaattgtggacagccaggcgaaatatttgcggatgcgcaagaaaggggaagaggaacagaatgattgtattatttctccgatgccgggcaaggtggtgaaaatacctgttgtagtcggtcaggaaatgaaagcgggagatactgccatcgttatcgaagcaatgaagatgcagagcaactacaaagtgacttcggattgccgcattaaagaaattctggttcaagaaggtgatagcataaccggcgaacagacattaataacattagaaccgattgcataataataagaacggattgcattatggaagaaataaataaagcatacgccacgttcgaggaacgtgaccgcatcgcttctcttggtggaggcgttgataaaatagagaagcaacatgaaagcggtaaaatgactgcccgcgaacgtatcgagatgttactcgataagggtactttcgttgaactggataagttgatggttcaccgttgtacgaactacggtatggataagaacaaaattccgggagatggtatcgtatccggttacggaaaggtggacggtcgccaggtgtttgtttacgcttatgactttacggtatatggcggctcactgtcagcttccaatgctaaaaagattgtgaaagtacaacaacttgcattgaagaacggtgccccgattatcgctttgaatgattcgggcggtgcacgtatccaggaagggatcgagagcctttccggttatgctgatattttctatcagaatacaatggccagcggtgtgattccacagatttcggcaatcctgggtccttgcgccggaggtgcctgctactctcctgccctgaccgatttcatctttatggtgaaagaaaaaagtcacatgtttgtgactggtccggatgtagtaaaaactgtgattcatgaggaagtaagtaaagaagagctgggtggcgcaatgacacatagcagcaaaagcggtgtgactcactttatgtgcaataccgaagaagaattgctgatgagcatccgtgaactgctttctttcttaccgcagaataatatggatgaagctaagaaaaaaccttgcactgacgaaacaaaccgcgaagatacttctctggatacaatcgttccggtagacccgaacgtaccgtatgacatgaaagacattatcgaacgtgttatagacaacggctatttcttcgaagtgatgccgaactttgctaagaatattatcattggctttgcccgtatggcaggtcgttcggtaggtatcgtagcgaatcagccagcttatcttgccggtgttctcgatattgatgccagcgacaaagcaagccgttttatccgtttctgcgattgcttcaatattccattgattacattcgaagatgttccgggattccttccgggatatacgcaggaaaacaatggtatcatccgtcacggtgcaaaaatagtttatgcatttgcagaagccactgttcccaaactgacagtgattacccgcaaagcttacggtggtgcttatatcgtaatgaactccaagcagaccggagctgacgtgaacttcgcttacccaagtgcagaaattgctgtgatgggtgcggacggcgccatcaatatcctgttccgcaaagctgacgaagcaacaaaggccaaggaactggaagcctacaaagaaaagtttgccactccgtatcaggctgccgagctgggatatattgacgaaatcatttatccgagacagactcgcaaacgtctgattcaggcactggaaatgacggaaaacaagatgcagacaaacccgcccaagaagcatggtaatatgcctttataacaactagataaggtgcgcaaaagcaccactcatacaacgagcttgcaaagattctatgatatactttaggagatttgtaagctcgtttcttatttgtaagcctgccgtttctttatatgtgacaaaaaaaacggcacctcgattcacatcgcagcaccgtcacaacacaaacacaaaataaaacacgacaaaactactatgcaatcttcctgtcatgccggggaggcataccttgcttgacttatctatattcgcatacacacaagaagctttatcaggcgatttgcacaataaataacatacatttccggattttgttcacaggattgataagattttattcaataatatgataagaaaatgaaatagcacgccctttaaggaattcaagagaaacgaaaaaacggtaccccgattcacatcgcagcaccgtcacaacacaaacacaaaataaaacacgacaaaactactatgcaatcttcctgttatgccggggaggcatattcactagcctatatatattcgcatacctacaagtagccatcaggcgatttgcatatataaaacattcagatttttattttgttcacgaaaggagaagtaaaaatgttatttcttctccttatagtctttcaggaagccttccatcagccatttggcgagtgcctgacgattggaattcatcaccaaccgacgctgatcgaacgtattctggatattacccaactccacaaagacggaagcgggagtggtatgggaaagtacgtataagttacgcccgcttactgtgccggaaaagccccggttgggttgatgcttatcatattttgactcaaacgtatctttcatattatttgccaatcgtttgctttctccctttttattcgaataatagaaaaagacatccgtttgttttcccttactacggctatcaatatgaataaaaatcgccctgcaataagagtagttcttacggtctttccggtaaagagcgtttattttatcacagcgttgctgtaagcgttgcacctgattcaaaggaattggatcacccatacaagtctcccgtttactgtttgacaggtacgaatcatcacggataccatctttagcatcttgaatgatgatacggacttcggctccttcctgcatcaggttacgttccagacggagagcaatatcataagcgtattcatcttcgtgcaattcgtatttaccaactttcccgatagcacccggatcaggacctccatgtccgctgaccacatagaagcaagcaccggcaagacggttggaagtgactttcacatcagccagttgttttccaaacagaggctgattgagggtagttcctatttttgttgatttagctttcggagattgttgctttgtcccggtatttccggaaggtgatttcttaatgggaggaataacatacgtcacgcccactttaagcacattgttctttcccagtttctgtttattcagctcaataaagtcgtcgtaatacttcttcggagagcggttgtgcctcaacagaaaagaagagataccttcacccgccttcggggttgccttctgctgtgcccaaagagttgtgcccgaaaaaagaaaagctaagaataaaagaatatagagtttatttttcataactacattaactatctccttcgcaagagtatcatttcactcataaacagggcaaaaatacaattattttccctacttttgcagcattaaaacattttttgaaataaaacattaaaacccgataacattatggcaaaacaattcaaaccggaaaccctgtgtgtacaggcaggatggacgcctaaaaaaggcgaaccacgcgtattgcccatctatcaaagtacaactttcaaatacgataccagcgagcagatggcccgcctgttcgacctggaagacagtggttacttttatacccgcctgcaaaatccaacgaatgacgctgttgccgccaaaatcgctgcccttgaaggtggtgtagccgctatgctgacttccagcggtcaggctgccaatttctatgccatttttaatatctgtcaggcaggagatcactttgtttgctcttccgctatttatggaggtacgttcaacctgtttggcgtgaccatgaagaagctaggcatcgatgtgactttcgttaatccggatgccagcgaagaagaaatttctgcagctttcaaaccgaatacaaaagctttattcggtgaaacgatttccaacccttctcttgaagtactggatattgagaaatttgcacgcatcgcacacagtcacggggttcccttgattgttgacaacactttcccgaccccgatcaactgccgcccatttgaatggggagctgacatcgtggttcattctactaccaaatacatggacggacacgctacaagcgtaggtggctgtatcgtagacagcggtaattttgactgggatgctcatgctgaaaaattcccgggactttgtactccggacgagtcataccacggactgacttataccaaagcattcggcaaaggtgcttatatcaccaaagcaactgcccaactgatgcgtgacctcggcagcatccagagtccgcaaaactctttcttattgaatctgggacttgagacactgcacctgcgtatgcctcaacactgccgtaacgcacagaaagtggccgaatatctttctaaaaatgagaaagtagcttgggtaaactattgtggtctgccggacaacaaatattacagcctggcacagaaatatatgccgaacggttcttgcggagtcatctccttcggtctgaaaggcggacgtgatgtgtctatcaagtttatggactcactggaattcatcgctatcgttactcacgtagctgatgcacgcagttgcgtgctccatccggcgagccatactcaccgccagttgacggatgagcaactgatggaagccggtgtacgtccggacctgatccgcctatcggtaggtatcgaaaatgcggatgatatcattgctgatatcgaacaggctttgaacgcataacaataccgtaaaggtatcaaatactaagagaaggcacgggaatgaaagatcccgtgccttcttatttaccacaaaaagaaagttaatttcgaagagaatcatttcaaatgtgaaccgataaatcctcccggatgtttatctttgcagggaaccaaattctgcagagatatgaaaaagaatctattagtagcattcgtattatgcctttcttacggattttcttattcccattcgtttgataaaccaattaatcagacagcaaagatgtcaaactttgaaatggattcgtttaccaccaagaatggtaaaagcttgaagatcactttcttcaaacatgccagcttattactggactatgcaggacaaaaaatattcattgatcctgtttccgattatgccgactatacacaacagccgaaagcggatttcattctgattacgcatgaacatggcgaccatttcgatactaaagcaatagcagttatcgaaacaaaccagaccaaaattatagctaatcctaactgccggaaaaagctgaatagaggacaagagatgaagaacggtgatgtgcttcaactcgccaaagatatcaaactggaagccgtacccgcctataatacgactcccggcagggataaatttcatcccaaaggacgtgacaacggatatattctgactttaggaggaactcgtatttatattgccggagatacggaggatattccggaactaaaccaagtgaaagatattgatatcgcttttctgccggttaaccaaccatataccatgacaccggaacaagcgatacgggcagccaaaatcatcaagccacgtgttttgtacccttatcattacggagaaacagatatccataaagtaaaagacggattgaaaaatgagacaggcacagaagtacgtatccgggctttgcaataagatatacgtaaataatcagaaagtggctgaaaatatactcacctgaatatccgaaaggaccttgaataaagtgcactccaaaagttagatctaaaacttttggggtgcactttaatatctcaataagaatgattttcgcttcaagggctttccaaacattcagtcccttataaagagcttttccttttttaatcagttacttccaatcacacagcctcggcagacaaactggaaatcactgtatccacccaatatacaactgttctatccgccggcaaaactccttccagataaggtgaatcggatacctcctccaaccatgccgtagtaatcggtcctctttctcttgtagaactttgagttcctaaatacggactaaaattaaaaaacgtgtgttgttgctctacattatttttatctatatatgtaaaaacaaaagcctttttctgttttccacccaatgaagcccactctatctggtatgttccttcaacaaggaatttgctcatcctctgtcttataaatgaatttccctcctgttccttcttcagataaatgatatacatcatccggccgcaaaatgcagatatctcctttatttataaaagaataaggagccattgtcacatttactttttcctgcaactcgctttccgaatccaatgacaacatatcttcactgggtctggaaacctgaaattcaggttggtcgacgcacataaatgtcaatacgccataagaaacagtcacaagcagggtgacataattaccatccttatcagtaacggtaaccgttactttcccttttttaccatgcgaactaagccataatcggttgtcgatgactgttgctgtcacaattgtttcatcggagctttgtgcagagtagccaccttttccattggctatcccgatattctccgcttcccatccgttaagatacaagactgtagaagaaactgtgtttgtacaagttcctgtttcgtcaaccagttcggaaccactaaataagataatctctgcattatcttgacaggctgatacacaaaaagccataacagaaagaagaaagaagcctaataaagtttttgttttcatattttcagtggtatggttaaatcccggcatatgccattgttttgcaaagatataaagtatttgtaaaaaacactatctttgtatgaaaagttaccaatagtacagatccactagattcttccatacagcgtaagttatatgagatatacaacagaaggtcgttgaaaaggacgttcccgggggaaaaagggaatgggaaatacgggaacgtcctcaaaacataacaatacagaaatatggactttcacaagggcgcatttctgtctctcttatgcaacattcccttctataaaaatatggaggaaatatctggagaggatattattatgtgggaaatttagtttatagtcttaaaagcaatctgattgcatcaaagtgatgaacgataggcagtccgaatatattctcctactgcattgtcatcattgatttctatgtattttttcaataaatccgcaaatccggattttatctgttccgtttgcttgttctcgcaggctgtagaatattcatcaacagccatgagaaaatcctgcattcgttcattcagcattgttcctcctgtgcaaaccacatcggaaatataggcttggatactaccattttctatgacaacagggaggcggtattccagtcccgatttgccggcacgaatagaaagcacttttactacgggcgacacaatagtcaccgtatcggaaaaatcaaactttccgtggactatttctgcactatctaccagctgcccgctcgaaaaatctttcatataaaccatttttccttcgaattcgggcaaaggtgtactaccgttaatctcgtaaccttttatctgatgcccggtgcaagccactatcagacatattcccggaagaaaagataaaagtttcacatatctgttcattaagctcttcattcttctttaaaaaagaaaagccgtccgcactatcagctgaacggctttctcttttcattcatacatttgtataatcattcatccttagaatctgaatcccagtttcactacaggcatttcaaatattttgatattgtggtgactggcgttatatttatcaaatcctttcgggcaaatctgtatcaagtcatagcggtaagccagagggtgcatttcgaaaccgaaaacaaaacctttggcaatgctatactcaatacctgctacggcagctactttgaaaccgtacatctgaccggctttacttccggaaacatagacctgtgacggaagttcttccgagtcgtcactatccttataggtgtctccggtgtatggttcggttgtttcaatgcgtgccatctggaagccgagtgcgcctccaagatacggatgaatacgttcgttgcgagtcttgaaatagtagttggaaccgacagatacataccagttgttagtcatctgcgcattgatataactttgcgcagggataatcatgtcgggtacactgttgtctccttctacatagtctttcttaggagtgaggctgacgttcatgctgaactggaaatttacatcccaattgtcagacacaaaatacttaccttcaattccggctatattgaccagactattattattcagactcccgatgttcagatagcggttcagatcgccggagttatccgtccctccatttggaagtccgactactcctccgtcattggagaacttgggaagcagataagaagtgttttcattaaaaaactttccgctaccaagcaggactgaaacctgccactgtcctttcttcgggacaaacgacgcatcatcactgctgctgtaacgctgcgccattgaaggcgcagctgtcatacaggtcagcaaaagtaatgtgcatagtttttttatcatcttgttacttttacgtagttagggaattatttcaagaagatagcaagaagtgctttcaattgagcgcttgcagcatcatagtctgccttggcagcatcatattcagcctgttttactttgatattttcctgaatacttgccaatgattcagtaatataatctgtatcagtataagtacctgccgctaatttctctatatttctcttagctttagcaacatcggccttagcggcagtgacatttgccagagcaatcatgtattcttccttaaccaagtttttgatagcttccaaggaacctaaatcaccattagtaaagttattattcaaataaacagtgatttccgtttcaatcttacctttgataatttcattattgccgtattctttttgtactgtttcaatattatcatttacttctttaaagactttatcataagcagcctgggcttcgtcgttagctttcttagctttatctacagcatccgccaaagcagcatttgctttatcttgagcagcctgctctacagctttttgagcagtaaatgcttctttcaaagctttgtaagtttctacctgatcaattatagcctgtagactagccgtttctgctgttgcccaaatcatcttaccaagagaaccataattaccattcttcaaagcgtctacatggttaccaccagccgcagctattacttcgtccttagatactggcaatcttcttggattattacctgaattgaaattatcgctaaatacagcagaagaagcagatttccacttttccaatggagtctttacactggaatcttgctctacatctattaattttccaatattttctttactaatttcatttgcagtagcaatgtcaccagcatcccaaatgataaagcctaaatctactccaacaacttttttaaagttatcagcgtctgctatcaaccaagcagagatttttttcgtatcacttccttttgttgcagttgccttagtaacttgtgcttctttagccaatgcatccttatagtatgcaactaaagccgtagctacagcatcaatattagcttctttttttctatcttctggtttaagtccattatatttctttattgcagcattagcggctgcctctgatttctccaaatctattttcagactttcatcataagctgccattgcatcttcccatgctttataatctttagcatagttctcttctgcttctttttgtgctgcaagagctgtagccaattgtggtttggcccattctatattttccaaatcaacacctttagtagccttatcaatcagcttaacccaaccatcaatctgactttgtgcttcagtaatttgtatacctttagcataggcaaaagtaccagtattagaattataaccagcaacagttgttccaccagatattgcatcatttaatcctttctttacactttcagcctccactttcttagaataagctgcagctgttttagctttgttcttgttagagttctggttatttttagcagtatccaacttattgctagtagcttccaagtcagatatcagtttaggattagcaacttccagcttacctttttcaatattatattgttgttccttgacttttgcagcagcaatctcttcttccagcttcttgacttctgcttcccaatctgcaacagtagtatactcattatccaagatagctttcaagttatcagcatacttctgcgtcatttctaaagcaaattctgcatttttcaatgcattatccaaaaccgcttctaaattattatcagctactatatcagaatagttagctaattgctcctgaagtttttttaagctaccggctttatagccatccacagactgggtaggatcttcagtaataagataaacataatacttagtcgtagaagaattagtctccgtgctttcatccggatttgtagtagtagtggaatttgcaacttccgatgacagaattcttttgataacagttgttgaatatccatacattgccttgtccattgcttgttttgcataggcgacttgcgcttgtacaccattcaaacgagcttgttcttcatctgtcagcaataacttggaagcttcaatctgttccatagcttgcttgtaagcttcctgtgctttagcagtgacagtttcggcaagaagcattttttccttatactgctcaacaatcaatgccttttcattttcccacttagttttgtcagcttccgcttttgcaatggcagcttccgcttccgctttagcttgtgcagtagcagcttcttccttttcaatcaggagttgcttcaactgaatattcagttcatgcaactgcaaatcaatttctgcagatttattctgaagtgccaaacctgcattaactaactcttgctctgcaacctgtgcttttctcaattcagcctctacaagctcaactgcagcttgagctttgataaaatcagactttgctcccctaagttctgcaatgccttccggttcatcggtatcaatacatcccgtgaatgtcgccgtcgtacctgccatgagcaaggttgcgactaaatacgtccattttctcataaaagtaaattaaatgttatacaattaataaataaaaaatttgtttgtactaattcatgatttatttcgcttcactccccctcttcccgttactttgtaggtaacgggaaaacccttgtgcctgctcttttggagtagtctatactagaaaataatacgatatatgacgaatcttcttacccctgcttatgagaaaaagtagaggggcgggaaatctattgcaaaatttagacgttaacaaagctctaagacaaagaatccacgtgttcttctgtgtttattcctattttgagtagtttattagaaaaaatgtacgattttgtttggatgttttaagaaatatgctcatatttgcagcgtcttttctccccgttacctacaaagtaacagcactattaatcagttacttgccacaaatatagttcctcttcagcgaagatagaatcgtcacattcgcttcatctattttcttattcttaaaaggttttagataagtctctgtgacgataatagatgaatgtcccatcgcctctgaaataatgcctggatgtatctcgcaataatatgccattgtagcccaagtatgccgagccgtatatgagcttaaatcagaagtcaatgcaagtacttgtttcagcaacagaagctgatagttaaaattacgcaaagctatctgatattccctgtaggtagcttcggtactttctccgccagtcagtatgggaaaaagataaggagaagcagaatcggtgttcatatacttttttattagtttcatagtttccggcagaagcgtcacagttagaagccgcccggtttttctacgacgataagtaagcacattccccaccatatcctgctttttaagataggcaagatctacaaacggcataccacgaagcatgaacattaagaaaaagtacgcgcgcgtacgttgtaattcttcccttccctgatgaatttgtttgggaagctctttcatcaatcgttccatatcctccttttccagtgcacgctttctgtcagcacgcgttcctgtataaacataccggaaatgatgcggtatataagatgccatacgacggtcaaccgcgcggttgtacaccgccctcaatgtacgcatataggttgaaaccgtgttccaactacaatccttttcccgcaaatacgtttcaaaacttttaagaaactcctgattcactttcttgaatgacagattcctgctcccattaaatgcaatgatagcattcatgctactcctgtaaacatgagcagttccataattcccactttttcgaagcccttcagctacttccttcataaatgaaatcaaattccccatttttattaattttagttatcactcaagcacatccctgaagaaaagcgccctcaccgcaattccccccaatgctcttaattcaaaatctcaaagtatcatcatacaaatatgatgaattatgttttctttatatacacccgatgtgttcctctgccatcaatcccgataccggaaccgggcgtatacgcccattggcgcaattcattggtagccgccgtgcgcagcagacctgtcagtttccggtattcgtagaccgtcagaaaaggatgttcctccagatatctaacagccaatgctagtcgttgctccggtgtatacttctgtgaagagcgttgcgacttccacggagctctttccagcagacatcttccgttgatacgcctcaccatcttcctgtctacacgaaagttcacgctccccaccacaatgcttcgtgcgttacgatgggtttcaccctctccggtcttttcgcgttctttatctttgcataacgccaacgaaggagagaatgttccgataccatccagcttcacagacttgccttctgccatctgatgtgccatttcaataccgatctgtgtaattacgccttccacatctccgacattaaagccactgctggatgctatctgacgtattaaatcctcggtagatacctgatctatcattgcaaaccgaggataaagtacctgttcgcccgttccatgaatatcgggcatttcttccattacgtacattgccataatactaaagtttatttgaaatattgattattaatagaaaacttactcgctataggtagaaaacttgttctcccctacaggaaaagttgtttttcctataggacaaactaaaaccgcaagttctggttttataactgaaacttctgattacataatcaaaagttccggttttataatcagaacttgcggttatagttttcttaccaacaaagatacgttttcctgccgggataagcaagtttaatccctatgaaaaagaagtttgattacaattcagttacttatcaccgtttctttactttatatcctttcagggtaaaaccaacttcaaacaggttcaaaagggctatccggatgttatcttctatataggtctccatattatcatattttgcaaagttgacgggaaggagtctgttattcctcctaaagctttcatccggtattttaccggtaaaacgtcctttcttcttcactccccaacgaatggttttactacaaggaagaggtatacctatcgtcagcactttttctttagttaccgtatcggtgattccatgtttccagatactgatatggttggctcccaaataagtgccgatataaaggacaacggtcagcgtccaatcgtccaaagcctcatcggtttgaataccattcaccaaatcagagaaatagccttcaaccttttctctgtcaaaacagtttagttcaggccattcacatttctcaaacagttgatgcacattgacaggaaccagtaaggtggttatttctaactgatatttcattcatttcgtttttatatcattgcatctaaaatcgtctcaagtatcttatcgactataaatatacaattttaccagatcaaatgctaaagagtagaactttttttaaacctatttctgaaaaagaaaggactgtttgatacacccctcctatataaacagggtttatcagacagtcctttccgtgcggagtatgattcgtccgttattcagtggacgatccttgcttttcgtccttacggcatttcagtttccatctggaacttacggcttactttcatcaaattgatagtgtaagtgactacgttctgtgcttcctgaaccatcgtgagatacaccatgctcacccggatgcttcctgattggctttggatgcgttgcagttccttacgtttcaatagtgaaagctgtccgttgaggtcgttggcacgacggatttcttcttcgaagtcgttgtactcgttgttttccattttcttacgacactgctgaatcagataggtgatatcttcggatacatcgctgaattcacctttctggatggcgtccaatgggttgaagttgttgtcgatatgttcgaggcaaggttcgcagaggcgggaaatactgtagaccaattcgctggcgaagtcgttgccttgatagtaataaagtcctttttcgagtacggtgttattgtcaagacgacacatggcgacggtgcccgaacgtttcatctgtttgatgagctgtttctcaaatttagtggaccccatggcacgacgcaatcctcgcagattttcatgaaggaatgaagtgacagtcagttcgaaatttgtttctgcatattccaatactttggaaagttcttcgcgggtgtgcttacgcatcagttgcagggcttctgtgctgtctgtggtttgcatcagttgcttcagcgtttcgttaccttgttctttcgctttgcgtttcttgtacatcacctggctacggatcaagatgaatacagctataccgatgagggcgatgatagagatgttacctccataatggagtacgagagctacgaagaaacagatggtgaaggcggctccggcggtgatgaaccagcctccgatgacgcttaatacgccggtgatacggtaaacggctgaatcacgtccccaggcgcggtcggccaaagaagtacccatagctaccatgaaggttacgtaggtggtggaaaggggaagtttcagggaggttcccaaggcgatgagcagaccggccaataccaggttgacagaagcgcggacaaggtcgaaagcagctccgtcggcaatgattgcttcgtctttgcggaagcgggagtcaagccattttttgctgccgtccggcattattcgggagattccattggcaagtgtcatgctgatgcggactactgtgcgggcgatcggagtacttccgaatgcttcttctccttcatcttggcgggaaaggtcgacagatgttttaattacagcatgtgcttttttagaggtgcagagggcgtagaccatgacggctccggctccgataagaaaataccacggtgttttagcaggtcccagcaaggaggtcatcaggaagccgttcggatttccttctccgttggcggtgtaatctaaaaaagaggagaaacctgcgaggggaacgccaataaagttgacaaggtcgttaccggcaaaagcgagagccagagcgaaggttcccatcagtacgacgactttgaaaacattgattttcatccagtgaaggatttgcatcagtacggtgaagaatacaaagaaaacggtgattagcatcagtgtgttgtcttgtatccagtgtttgttttcagaggtcatgaaggagctgtctttcagtcctttgataagcatgaaatagatgatggcagtagcggctatccccccaaagagggcgatgctgtatttcatctttttcgtatagttgaaagtgaatatcacacgggcaagccattgtacaagcattccgaagaagaaggcgatagcgacggagacgaagatcgccatgatgacggagagggctttgtcggtgtttatgaggtcgcccagaccgagggtatcgctattatgtactttgataagtgagagggcgaatgttcctccgagtagttcaaagactaatgatacagtggtggaggtaggcattcccatagagttaaagacgtccagcagtactacgtcggtcaacatgacggctagcagaatgcacatgatttcggcaaagtagaagtgctcgggctggtagatgccgtgccgggcaatgtccatcataccgttggacagggaagcgccaatgaatataccaataccggctatgaaaagaatggttttaaacgaagcggccttggcgcctaccgcagagttcaaaaagttaactgcatcattactgactccgactatcagatcgaaaacagctagtacaaagaggaagatgataatgcataaataaatagtctccataataaatatatgtgtatgttgtttccggctgcaaaggacgggatttgacgttgcagggaggtgtcatacatgttacatttatgttacaatcatctttcttttgtcttgaaacaaaagaaagaagcaaagaaaaattcaaggctgactttttctcctactcgctccctgcactgcgctaaagggcagaaactcgctacgctcaaacagtctgccctttttgacgctccgttacgggggctcgcttgacggagaaaaaagtaggccggaggggcgtgtggggtgggcgttgtggaggaggttgcatgagatgtcggtgtggttgttgcgagggaagccatgtagtaagggcgtataacgggggatgtgcagcgggaacgttgcgggaaggccgtgtggggcgttgtaagttgcaggacacgggtatgggattcttatgttagttaattagttggttgttttttagttatttgttttgtttaaccagtcatagaaggtgtattgggctcgtacagcgggggtgccgggcgctctttttttgaatatatttcgcaggttgtcgtctacccagcaggctttttggttgtcggcgagctggatattaagcatttcgatgaggcagtcacgcaggtcggggccgagaatgggggtgatggcttcgatgcggcggtagaggttacgacgcatccagtcgggggagcccataaagactttgggtttgccgtcgttgccgaagtaccagatgcgggcgtgttcgaggaaactgtctacaatacgggtgacacgaatgttacgactgtatgactgtccggggataagacaacagattccacggacgatgaggtctatttgtacgccgtgttcggaggcttcgtagagacggtcaatcatggcggggtcttggagggcgttcatttttaggatgatacgaccttgtttgccttcgtcggcgagggcgatttcccgatcaatcaggcggttcaattcggggatgaggttgaaacgggcgacaagaagggtggtgaacttcgggtcttctttgccttgcagggtgcggaagaggttatagaggtcggccactatcttcggacggcaggtgaaaaggccacagtcggcgtagagggtggcggtcttttcattaaagttaccggtgctgatataggcgtagctgggtattttttcaccgttcagtccgcggcggcggataagggctactttggcgtgtactttcagaccgggtatgctgtatattattttaatgccggcggcttgcatcatttcggccgtggcaaggttgttttcttcgtcgaaacgggctttcagttccacgaatacggtgactttcttgccgttttgggcggcggctatcagggtgttgatgacggcggagttttcagctacgcggtattgggttaccatgatttcacgggtttccgggttgtgcacggcttcatacaggaagtggatgaagtgctcgaaagagtgataagggtaatataataacaggtccttcttggcaacgtagttgaagatagattctttttcgtcaagaatggtcagcttcattggcttcggcttttcgaggctgtgaagaaatttgttcgggttgggaagatgacgcaggtcttcaagattcaggtgcttgtcgccggggacaagttcatcgcgctgaatatggaaggcgtctaccagaaagttcagaaagtcatgaggcataccacggtcgtagacgaaacggcagacgtcaccgatcttacgtttcttcactttcttcttgagttgagcaacaaggtcggcactgctggcggtgtcgtcaattaatatgtcagcgtcacgggagattttgatgcagtagctggaatcaacatcgtagccggggaaaataaggttgaggtttgccttgattatatcttcggtaaacatcaggtaatggtttttctcgcgggatggaagttcgatgaagcggggcactttggcgtagggttgcttcatcacgaagtaaagaggttgccgggattctgttagactggtagttccttcatttccttctttcttcggatagactcgtatggccaggtaaaggcggttatcccgcaggaaggagactattttatctttggatacaggcacaggctgcaggtagggaaaaatttcttcccggaaaaagtctttaataaactgctggtggaacggttctacatgtctgtcctgataaaagatgatgtgattcttgcgcagggcaggtagtagtttctcttcataaatgcgtacacggtcatccagctggcgggtgacttctttatttatttcttctaccagttcgcgggcggattgtacggtttcttcatcactttccgtagcgccggaggcaacagctttatggtcggctacacggattttgtaaaactcttcgaggttggaagagtagatagagatgaagttgatacgttcgtagagcggtagacgctcgtccagagcctccaacaatacgcggtaattgaatgagagccaactaatatctcgcttgaaataattatatttgctttccatgtgctttaagatttttccaaatatagtatctttgtgggattaaacaaagaaatttatgacaagaattggattattatctgatactcacgcttactgggacgagaaatatctggaatattttgaaccgtgtgacgaaatctggcatgccggagacatcggttcgctggaagtagcggaaaagttagccgccttccgtccattccgggcggtatatggaaatattgacggacaggaaatcagaaagctgtatccgcaaataaaccgtttcacggtggatggtgcagaagtgctgattaaacatatcggcggttatccggggaaatacgatccttccatcatcggcagtctgatggcacgtccgcccaaactttttatcagcggacattctcatatattaaaggtgaaatatgataaaacactggatatgttgcatattaatccgggagctgccggcatgtccggtttccacaaggtacggactttggtacgttttgttatcaaccagggggcctttcaggacttggaagtcatcgaattggcggacaaataaaataaatgttcctgccagattgaaaaattattttaaaattttgccacgtcggaattctttccgacctttgcacgcagttaatgaataactcagacgaacatgaaaggaattattctagccggtggtagtgccacccgactttatccgctctctaaagcgatttccaaacaaatcatgcctgtgtatgacaagccgatgatttattatccgttgtcaacacttatgttggcaggaatacgcgaagtgttgattatttcgactccacgcgacttgccgatgttccgcgacttgttgggaacgggtgaggaactgggtatgtctttctcctataaaattcaggaacaacctaacggactggcacaagctttcgtattgggagccgatttcctgaacggcgaaccgggctgtctgattcttggggataatatgttttacggacagggcttctccgccatgctccgccgggctgccaatatagaaaagggcgcctgcatcttcggttactacgtgaaagacccgcgcgcttatggtgtagtggaatttgacgaacagggaaaagtgatttcactggaagaaaagccggaagtgccgaaaagtaattatgccgttccgggactttatttctacgatgccagtgtgacggaaaaagcagcggctcttcgtccttcagcacgtggagagtatgagataacagacttgaaccgtctgtatctggaagaaggtacattgaaagtggaactcttcggacgcggatttgcatggctcgatacgggtaactgcgacagtctgctggaagcttccaacttcgtggccactattcagaaccgccaaggtttttacgtcagctgtattgaagaaatcgcctggcgtcagggatggattccgacggagcagttgcttctactgggtcaacagctcgaaaaaaccgagtatggaaagtaccttatcgaattggctaaacaatcctaaaatcaacataaagaataaaatatgaaaacttatctagtgaccggtgccgcaggatttatcggggcaaattacatcaagtacatcttagccaaacataacgacatcaaagtcgtgatattggacgctttgacgtatgcaggtaacttaggaacgattgccaaagacatcgacaacgaacgctgtgtctttatcaaaggagacatttgtagccgcgatgtggtagacggtctttttgctgagtatcgttttgactatgtggtgaatttcgctgccgagagccatgtggaccgcagcattgaaaatccgcaactgtttctgattaccaacattctcggaacacagaacttactggattgtgcacgccgtgcatgggtaatggggaaagacgaacaaggatatccgacctggagaaaaggtgtacgctatcatcaggtatctaccgatgaggtgtatggttcattgggagccgaagggtatttcactgaagcaactccgctttgtcctcacagcccatacagtgcttctaagacaagtgcagacatggtggtaatggcttaccacgacacttataaaatgccggtaacgattacccgttgctccaacaactacggtccgtaccacttcccggaaaaattgattccgttgattatcaagaatatcctcgaaggaaagcatctccccgtctacggtgacggtagcaatgtgcgcgactggctttatgtggaagaccactgcaaagcaatcgacctcgttgtgcgtgaaggtcaagacggagaagtgtacaacgttggtggacacaacgagaaaacaaacctcgaaatcgtgaaactgacaatttcgactatccaccgtctgatggcagaaaatcccgaatatcgtcaggttctcaaaaagaaagtgaaagacgaaaacggagatatttcgatcgactggatcaacgaagatctgattactttcgttaaggaccgtctgggacacgaccaacgttatgctatcgaccccaccaagataacaaatgccttaggatggtatcccgaaactaaattcgaggtcggtatcgtaaagacaatcgaatggtatttagccaaccaagcttgggtggaagaagttaccagcggagattatcagggttactacgaaaagatgtacgggaaatgattctcaatttatcaacattcctattgcaataagaatacccataagcagcatattacgcgaagtctcgcctaatatgctgtttaattttttaccgctgtatattttcaccatccgtttccaggtaaggaaatgagggatcagataaagttgcggaagaaaagcggcgtagaaatgaccttcacgaaggaaacacaagcagagaagagaagcggtaatccccagcatcaaataaaaatagcgaccgaatttctcgccaaaacgaacgatcactgtcctttttccactgcgtgcatccgcttcgcggtcacgataattattgactaccaacaatgtgtcgataagcagtccgcagattaaagaggcgatagtgacatccggtgtccaagttagcgcctgtacgtaatatgttccgcctacgggtacaaagccgaaaaagacaatcaccaatacatcgccccaaccgttgtaagaaagaggataaggaccggtggtataaagaaaggcaaataacacacaaagcactcctacgataatcaattcccacccggcaaagaagagtaacgtacagccgataaggcaggcaagagcaaccgtaataataatcccggttttcatcgcttgcggagaaatccatccttgcgcacaagcacgttcggggcctaaccggtcttcccggtctgttcctttgaggaagtcgaaaaggtcattgatgaaattagcggcaatttgcatcagacttgcaaacagacagcagatcagtgcaggcaaccagtgaaaacgtccgtccattgcagcaagagcagtacctatcataaccggagttatggcccctgtcagcgttttgggacgtgcagctaatatccatgcttgtagcgagttacgctttacttcttccatactttaatatattataaatagttttgacggacaaagatacatgatttttcgtatctttgcaccccgaagttacgaaaagagtgtaatttattggaaatgagcgtaggttaattgctcttgatagtaataggttacgatttagttagttatctactgcattatccttctgcgcgttgcgtaaccttcaaagaactcttcgtatgcaaaagtagctatttaattcgagattttgatataaactcccgttttttatcccctcattcataagaattttccgtaaaagcggtattgtccgtcggcacaccattgcccaaaacgagtttggaacaaacgtgtgccgactaccgcatagctggagaaaagggcattgcctcacgcctaaacgatgtttagacagatgaagcaatgcccctttcttttgcgcctatgccaagaggtgcttttacgggttttcaaatgatttttcttttttcgctgtctcttttgccggaagcggaaagtgaatgcagagtgtgtcagcctgccccatgaatgaaacaggcgcccacacacagccggacaaaccgggaagaatgattgttgccacccggctgaacaagttccgtcggatcggaaacaatcatacttcctttgttgtggtttgcccttttcacgcttccggtgatgtctttttccttttggtgattcttttttttacggattttcccctgaagtttttttctacacaatctgcctctgttttcgtttacctccattttgcgcctttcagtaagccgcatcagtcagtcattttcgttctgggcgcaaaggtaattccgggattggacgggaaagcaaggtcaagcctcctgttttcggtaaaaatctccagccctgcgggtagtattttgaccgaaaaaccttgcattccctaatccctaccttttcaagcacccgaaacgaaaacgaccgatgcgacagaaagacgcataaaaaaaatgtcggataaacgagaggcagataagatagtttgaaactcaactccctcagctcttgaatccgcattaaaaacaaaaaaatcaaaaacagcgaagatatgacggcaacggcaaatttcagacaaatggcgcaacacatcgggttggcgatatgcggcttgatgatgcgcaccgccttcggggtgttcggcatcctttggggcatcatcagagagattgtaaacggagtgttccgagtggcgataggtgtaatcgtggctatcctttccaccattgccttctttggcttcatcctttggttattcaccctttaacccttaccgacatggcaaaaagaaacagcaagacggcagcgcagcagtgcagatattacgaggtggacaacatcttcgtgtatatggtggaaacgtacatcaacggcaattttgaaactttccgaagattgtaccacgaactgaacaaggacgcacggagggatttcatggacttccttctcagcgaggtagagccgacctattggagagagatactgaaacagataatctaaaaatgacagcgatatgaaaggaacagaccatttcaagagaacgatatatatgtacttggaacagcgtgcggaggaagatgcgctatttgcaaagaagtaccgcaaccctgccaagaacatggacgagtgcgtgacccacattctgaactatgtgcagaaaagcggttgcaacggtttcacggacggagagatattcgggcaagccatccactactatgaggaaaacgagatagaggtgggcaaaccgatggactgccaagtggttgtgaaccacgttgtgaaactcacggcagaggaaaaggcggaggcacgtcagaacgctgtccgcaaataccaagaggaggaactccgcaagttgcagaaccgccacagaccgtcagcgagaaaagaaaaccaaccccaaccctcattatttgatttaggcttatgaaaccgaagaccaagatacagaaagaggtggcaagactttccgccaaccttcgccccatatcagcgacacaaatagattgggcataccgccactgcgttgagcatatcggctaccgcaccaagaaagggaacatcacctgttccgactgcggtcacgagtggcacagcgacagcggactatgcgacacccttgaaggctgcacctgccccaaatgccatgccgaactcaaagtgcaggacacacgcagacgcatctacaaggaaacgcagaatttcagcgtgataaccacctgcaaagggtatcaggtaatccgcgtggcgcaggtcagatgcgagagcaggaaaggcgaaccgatgcgtttctactgccacgaggtcgtgcagcgttggatttcacccgacggcaaggttacggacatggcgttgctccgtggcttccttttctgctattgcgatgtgtgggcattaggcagcgatatggaggtaagaccgcacaacagcctatacgatgatgtggtggcaagaagctgtgcatatccaaagatgaggatattgccccaactcagacgtaacggcttcaagggcgatttccacggcatctcccccgtgcgtcttttcaaagccttgctttcagacccaagaattgaaacccttatgaaaggcggtgagattgaggtcatgaaacactttcttttcaatacccgtactgccgatgaatgttgggcatcatatctgattgccaagcgtcacaagtatcagatagacaacctctcaatgtggtgcgactatctgcgtatgctcaaaaaactcggtcaagacctccgtaacccgaagaacatctgtcccgaagatttcatggcggcacacgacaacgcaacccgaaaaattgaagccatacacgagaaggaaagagccgcagagcaacgccgttgggagattgaaaggcgtgagcgtgagcaacagcgacaactccaacgaaagaaagatgcggaggatttcatcgccaacaaatccaaattcttcggcttggtaatcacggacgaggaaataatcgtcaaggtgcttgaaagcatagacgagtattacaacgagggcaagacgcagggcatctgcgtgtttggcagtggatactacaagaaagccgacaccctcatactatcggcaaggattggcgatgagattattgaaaccgtagaggtggacttgcgaaccctcgaagtggtgcagtgccacggcaagcacaaccaggacaccgaatatcacgagcgcatcatagaccttgtgaacaagaacgccaaccttatccgtgagcggatgaaagcggcatagcataacccctaaaacaacattgatatggaagtaagaattgaaagtatgatttgtgtgtgggatgatgcaatccccacgatgttccttgaatttgtgaacctcctcactctcacaacgagtgagggggaattgagaaagagcgtaaaggagtttgccgagaagcacgaacttgacaagtttttcctttacggcttcggctcacaccatttctacctgcaccaacgctacacaagcaaccccgaaatggtgatgaagaacagagttctgtcagtacatttttaaccatctaaaaagcaacattatgacaacacgaatgaccatcaacggagtaagcacctgcgcggaagcaggtacggagaaatacgagcgtttccaatcgggtatcggaagacgcaggcggacacttgtgcagtacgactaccgccaccccatagacagagaattgttctcttgtgtcaaacccacgttggacgagtgccgagccgcacgggacaagtggctgaacgcaaagaagggaaaggaggacagactatgaacacgacctatcaaacgctgatagtcaagttcagcgaacctatcacggcattggacggtatctttgacgataccggagcgtggggaacggacaccctcaaggggtggatagatgattacgaaagcacacgtttcaccgccaccgacagccatacggcagtcatcacgagcgagtacaatatggaatgtgtgaaagagtggctacaacggcagacccccatttccgaaatgcgagaattttgaacgggatggcggtgtccgcaccgccaatacttaaaaccctaaaaacaaaagatatgatagccaagacgatattacagcagataggcggaaaacgcttcaccgccatgacaggtagccgtgatttcatagatatgggcaacggcttacggatgagccttgcaaggaacaaaacaagtgccaaccgccttgacatcatctatgacgaaggggcagacctctacaatatgcgcttctaccgcaggacgttcagcaaaaagacctttgagtgcaagacaaaggacattgccgtacacgagggtatctattttgatatgctggaggaaatgttcacgatggtgacgggactttacacacgcttttgagtggcggggcggcgagagccgccctactttctttcagtgagcatgatggcggacaaagaaagtagcaaagaaacctttgtccaatctgcgataactaaaaaatccgcaagtaaaacttgcggaggctatatattgggtcgttattttttggtggaggggaatgataatctcgaaccgttgaactacacatttctgcttcgtctccatttcccccaacgatttgatacgttcaatcatttttgttgttcctttctgaattttcctaaatactttcttcataatttcgctatactttttatggttaataactatgttttgtattgctctcacaacacttacaacttgaagtgttatttggaaaccgataggcaaaaatggctcaacgatgtcaattaacgagaaaatcctacgataatctatcaagtgatagagcaaaagacgtgccaagttaaatatggcacgtcttttgccagttttgtcagtccttttatgggatatacaacagcgcaaactccgcctttctccgtttgagcagcatggcgtggcgttttcctttgtagttgcagaaggctatatactcacggtagatgttcctgtcaccagcttccagcttcttgattaaggtgcttttggggattgttttgctgcctaacagcttcgccggtcccacattgtaagctaacgtgccaagcaaaatcgaatcaaccccgaatttacggaacatggcgacaaatttgcgcaggtctttccgcaaaagttcatccgcatcccgttttgtcatggttcgtgccgaatacttctcgtttggcaaaagtttgtgaccccaaccgacgtatgggtagtgtttttctgagtgccagccttcaaagtagcggcagcataaaaaagcacgttccataagcggcagtcggtagattgccgcctgcccgtccgttccctcttggcggctgatctgcgcggacacagaacagaccgtcagaagtgaacagagcattgtcatgaatacacgcatcatttcaacaaggggctgaagttgccgatgggaacgatggtaagatcgtcgtcctttacattcctgttgttgaagtcaaattccagttcgtaggagttgctaaagttatcctccaccaccacgatgaaattatgcgcctcatcacccgccgccgtgtagtacaggcggaatttttcgttctccagcaggtagcggtcgttaggcaggaaggtgatgccgttatccattttgagcgagccttccccctcgaactggaaatagcggatggtatagagcgtacccgaaaagtcgccctcctttttcagttcacagcggatttccactgtctgcccctttactaccttgttcggcacgggcatgacctccaccgtgaagggataggactgctggatgtccatgtcatcgtcacatgacacgagggtgaatgacatggcggctatcaggcataacgccactgccttgaatattgatgttctcttgtttctgttgttcagtatgttcattgttcttcgatttttagatggttgtttttctgttttttcgttgtcagttgcaggtactcgttcaagtccttgcaaccgtcatagagggaggaacggtcggtgacacgttccccgtatcgcatggtaagtgcggcaagcgtccgccgtccggcttcgtcacggtcgaggaagcagccgatgcgcccgtatccgtccagcaatcccgccgccttctccacgttggcgactgagttcagcacaagacagtcagcgttaccggttacaccaagcgtcacggcagagagaaagtccatgaagccctcgaacacgaggcactcgtcagccgggatgtcattcgcctttaccagtgatacagacttcggaggtatgcaacccttgaaatatcggcttctgacttcatagccacctgccatgttcggaaagccaacggcaaaataccgtttcccacgcacaccgtagttcaagcggcagcagtgacgggatgcgatggcgtaagggatgccccgttcctctaaatactccgtcagcagtgagcggagcagcggagcgacctccacatcctcaaaaacggattcggtcggcttcgagagatagacgggcttttcccatccggcaaccgtcatattggcggcttccgctatgaacttcgcttgcttcatgaagtcatcgctttgcagaaactccccggcaagcgtgaagatgtcgccgcccttgcccaaaccgaagtcgtaccagagctgtttcgccacgttcacacggaaagaggatgtgcgctcgcccctgtacggggcaagataccacagctcgttaccgctccttctgacaggctcatgccccagccgtgcgagaaaatccgcaagcggcatccttctgacagcatctatttccgtcctttccatgcccgtgtcagttgatgatgaacttgataccgaccccgaactgcgtgtggaacttccgtgtgtcgccaccccaaaggcaacgctcccgcaggttggcaagcagggcgatacggtctgccacgtaacactccacatcgagcgtcagcgcaccgccgtagatgaaggcgtcccggtcgtgcagcgtggagccgtcatgcagcaccttcttcccccaatttaccgcctcatatccggcgagagccgaagccccggcatagacgaaaacaatctttcgggcgtccgacagtatcttgaagtaatagccgccctccgccgtgaactgcgccacgggtatcttggtgtccttgtagggattgttcttcaacaggtattcgccaccgaacacccacttgttccccttcttcgtgtaggtggagagagccgccccgaagctgtacccgccgtccttgccgccgagattgaagccgtccgccatgtccgccctcacctcgatgccctgcatcttcggcagacaccgctgggcgtgcgcctgccctgtaaaaagggcaagcgacgcgatgattattgcgatgtactttctcatggtcagcgtacttgaagttcgttgatggtacccgcgcgtaccaaatcctcgttctcaatcacgaaggactggtgacggccgccgttcttctcgttcaattccaccacgaggcacttgtcatcggggatggtgaacttcgccatcgtgaagaccgtgcgctcgctctttttgcccggcacgagggtggcgtagttctgcgcgcggagcggcagaataatctgctcctgcacggcagtacgcttcgcaaccttcttgtccacgattttccaagtgatgtagtccacatcgaaaggcacgttgctctggttctttatctccgtgtggaaataaagcaagccgttgtgcgtgtagatgcctttcaacaggtattggatgccgaaacgcttgcagccgatatgcttcacctcgcgcttgttctgtttgtggatggacttcatgataaggcgcaccagcatcgggctttcgctgcccagctctttcagatagatttcctgcgcgttgttcgggcggttcaccgtgctgccgtcatggatgaagtcgcacatctccacgttgagcaacagcggttcggcggcgtacttcacgttgaaggtgtagaaactgccgtcctccgtgatgacggacatattcgtttcgttgggaaaattccttacggtagccttcacacggatgatgttctccgctccgtcggctttcccggcaatcaggtcgggcgagcctaaatcgacatagcgcacctccgccggaaaaatgacgtggacggtcttgtcgtaggtcacttccagaccgtgcggcggtatcatgcggtcgaaggtcagcttgcgtgacagcccgtgatataggtcgccgtccgcctccttctgcggatagacctccttcgtcaaggtcggttgttcacttccgttggtcgtttcaacggttacattctcctgcgcgttggcagttatgatgcccatagcgagggcaaacatgatgattacttttctcattacttttggattttagtggtaatttttattgttttcaatatttttcttggtaaagcatgaccctgtacccggctttcagatgcaccttgacggttcgcatctttttggcgatgtactggctcgtgccttgtatcagccccttgcccaagtcggaggcgagctgcgccccggcattggtggagatgttgatgctgcttcccagcgagccgcccatgttggcggcgacctcccggacggcgttcatctccatcgagttcgggatgaagatgccgggctgtccgtccgtgtcatagaccgcaagctccacggggataatcgtgccgtcgtattccagcgaggtaatctcgatgtcgagccgctcaccctgtatcttgcccgtgccgaccaccaccgcaccccggggtattgtcctgcctgccaccgccataggctccagcaggcgcagccttaccgtctgcccgtccgtcacgctctgcgccccatgcacgcacgccggtatggtgttcctgtccaatacctccgccgtgccgacagccgtgttgaaaccccggttgcgttcctgcgataaggcggcgacaaactccgcgttactcataggctgtgagagtgaagaaactacttgatgctccacctgtctgataggcattgccttgttcttcttccctttctgcacggtagttggctctgccctctgttccgccgatggctgtcctccgttctgaccgcccatgtactttgccgccagctcgtaggacttctccataagagccacctgctcgtccatagaggaagccttgcccctctcgctttccagttccgactccagcgatgcgatgcgctccaacaattcgtccatctccgcattgtcgtttttcggctggtcgtagaagtttccgagcgtggcgttcaggtcacggtaggcggctgcggaggactggatggtctgcggcgtggctggctttgccctttcttccttgccgcccggattggcgaggtcgaagtccactccgttctccgttcccgctatctcgcggtcgaacatgtcgcccagctgcccgatggcacggttgcggctctcctgacgctcttccatctccccatgctcgtaggctttcagcttgtcgccgataatctgccggttcgccttgtcagcgtcgggcatctcggtgttgtatccgtccgttcccggcggttgctccttgccggaggacggggcgaatatcagccacatcgccccgatgaacaccaacaccatagcgggcagcacgatcatcttctgccgtttcagccgttgcgcctctgtcagcggttcgcgctcctttttcggtttccccgtttcgggagcagctttgttctctttcgtcggttcattctttgtctgttccatataaataaggtgttaagtgattgcctgtttccgccggggtcggcagttccacccgtccggcgtgtcccgtttccatatgtgagccgtcgttcctgccgatgtcatagacggctctgccgaaggtgtaaagggcaagcaccgcgaaggcggcgaacatccccagcacgatgcggcggcgtgtttccggcggcaagccgtccagataccctttgagacttgccgccaagcgtttccgtttgtcgtggagtttccaatacatgccccacattgattttctgatacttttcatgtcctgttaccgtttgatagtctgtaaatccttgttctcaatgatggtgaaaccctcgatggtaaaaccgttcgggttgtcatccgaccgcgatgcgttcagcaggcggcaggtggtcacgaggctgcgctcggtgacgttgctctgccggatgattttctgtgtggcgtaggtcacggcacggtagggataggcgttgaagtcgcacaccacgctgtccaccttcagcacttggttgatgttcccggcgatgatgcggttgtagtaccccttctccgcgaagtccgaataatagtggtacacgctcttgtccgccagcagcaaggcacgtttcacgttgtgttcaatcgcgcttttttcaggtgatagcgtgaagaacatctcgtggaaacggcgcacatgttcccgtgcctccgccgggcggttctgcgacaaatcctgagacaaggcgagcatcaggctcttgccgttgtccagcacatagattttctcccgttgcttctctgcgaaacggtaggagttccacacgctccacaccgtcaccacggcgcacagcgagaggaagacgataccgaacaggcgtatctgcctgaacgacgattcgatgtttctaagtgatttgaattccatttatattttccaatttatgattgcacattgattatttcagcaatttgccgacacgtccgactgcgtttcctgcggctgcacccgccacgctgcccgccatgcttccggctcgtcccgccatctggttcacgttgcgaccgtaaccgcccatgcctccggcttggataatccagcccgcaacggtgggaatggtaaagtagccgatgatgccgatgcagaggaatacgatatacaccccgtcgctcgaatccagcgagaagttcgggtctgcctgcatccgctcgatgtcgttttgcagcatcagaacctgtatcttcgccagtatggtgctgaacatgtccgataccggtagccacagatagacctgtatatagcggcatatccactgcgtgagcgtgttttggaaaccgtcccataccgacagggcgaaggctatcggaccgagaatcgccagcaccacgagaaagaaggtgcggacggtgtctatcacgagggcggcggcttggaacagcagttcgagtatctcgcggaagaagtcgcggatgctcttcttcatgttgtacattccccggtcgatatacattcccgccatcgtcaccatgtcggagggcgaccagccgagttcctccagttgcttgtcaaattcctcgttggacacgaggtaggcggtttcggggttgcgtaccatcgcctcgtattccagtttgtccttctgctcccggtatcggttcatgtccagcgtttccgcctccagcatctttgccgtgccctgtacgacgggtgagaggatgctgtttatcgtgcccagcaccacagtcgggaagaacatgatgcacagaccgatggcaaaaggacggagcatcgggaatacgtctatcggttcagctctcgccagcgactgccatacccggtaggcgacgtagaacagcgcacccagcccggcgatgcctttcgccacaccagccatgtccccacacagcggcatcatctgctcataaagtgaacgtaaaatctgatgaaggttgtcgaacttcataggctaccagtatctttcgttcatgttcccgtacagccccatgatgcggtcgaggtcgttcttctttttcgcacgcaggtaactcacggagatgttcttgttcgtgtagtagctcacgaggttgcggtaacgcttcatcttcgagtggcagcgttccaccacgtccatgcgctccttgtcggtcatggagagcgtggtgatgttcaccacgttcctgagttccgtcaacacttcgttgctttcctccagcagtttcgtgtagccgaaagcgattgcggaaagctcttcgggtctgaaattcccgtcacggagcatccgttggaaactgttcacatagatgtctgtgatgtcgcccaccatcaggatggtctgctgcaccttgcgggcgtccttgaccagattgttcaccgatttgagggcatcgtaatacttcttgccctgctgatagattttcaccgtctcctgaaagttgctcaccatgttcgtggcggtcttggaggtatggatgatgtttttggaggcattgatgatgccctgcgctagattgcccggatcgcttacgacccactgtgcgcttgccctgcccgcgaaaagcaggcacaggcagataatcattgttattcttgttctcatgttactttggattttagtggttgttattcttcggtcggatgtcccggctgcggcttcacccgcacatagtccccgtttggcgagaaagtcagcacatccgtggcctcgttgtaggacacgtcgatgcggaagccggtgttcatgaacaggttgccgttctcctcctgcaagagataggtttccggcttgagcttgcggcgcagaccgctacgacggaacaccgtcactttgtaggcttcgccctccttgtagataagcacgtcaggttttccctccacgctctcccagttcccgcacagcatgtcgcggcggttgtcggccacgtcgcaggattgcagcatcatgaccgccaatccgataaggcacttgctgacttgcagcattttcacttttggtaaattcatacgcgtttttcttttttggttgatacattctgttttttagttattccttgtttctccgcctttcggcaagctgccggatggcggcttcgatgtcgtcgcccagcttctccgccagacggtaaacctccactttttccgtttcctcggtggtgtacgccagatactcttccgcgctgacctccgtggcatagaccgccgactgcgtgccgcccaagcctatccacacctccttgtagagccgtgaagggttgttcgccatgttgatggagagtatctgcgacttctccttttccgtcagtccgagcaacgcctgtatctggtcgaacttgttcatatatttcctttggtcaagcaggattttacaatccgagttgttgataatgctctctttgaccaccggagaactgataatgtcgtccacctcctgcgtcaccacgattgcctcgccgtaatattttctgaccgtcttatacatatagcgcagatattcagccatgttcgccgatgagagggccttccaagcctcttccacgataagctgtttccgcacgcctttcagccgccgcatcttgttgatgaaggcttccatgatgatgatggtcacgacggggaacagttcgcggttttctttaatcgaatctatctcgaagacgatgaaccgcttgccgagcaggtcgatgttctccgtggagttgagcaggaaatcgtaacgcccgccccggtaatactgccgcatggtggtgagcatgttgtcgatgttgaagtcggacttctccaccttgatgtcacgctgtgccagttccttgcggtagtcgtcacgcatatactcgtagaaggtgttgaacgacggcacgatgctacggtcggattggatgcgctcaatataggcactcacggcactgcccagctcgccgctctccgtctttgtcaccttgtcgtcctccgacttccagagcgtcagcaacagggtcttgatgctgtccttcttctccacgtcgaagatgtaatcgtcggtgtagaacgggttgaagctgatgggcttatcttccgtgtaggtgaaatacacaccgtccgctccgcctgtcttgcgtcggatcatgccgcacaagccctgataggagtttcccgtgtccaccaataccacatgtgcgccttgctcataatattggcgcacgaggtggttcatgaagaaagacttgccgctgcccgaaggacccagcacgaacttgttgcggttggtcgtgatacctcgcttcatgggcaggtcggagatgtcaaggtgcagcggttttcccgtgagcctgtccaccatcttgatgccgaagggcgagagcgagctgcggtagttggtttcctctgtgaacaggcacaccgcctgttcgatgaaggtgtggaaactctcttccgccgggaagtccgccgcattgccgggtatcgccgcccagtagagtgtcgggcagtcgatggtgttgtggcgcggcacgcattccatgcttgccaactggctgcccacgtcgttcttgatatgcttcagttcctccgcatcgtcgctccacgccatgacgttgaagtgtgcccgtaccgaggtcagtccgtaggaatgggcttcgttcaggtattggtctatccactcgcggttgatgctgttgctccttgaatagcgagatagcgactgcatgttacgggcggacttctcgaacttctgcaaggtttcctcactgttgtctatcagcacatactggttgtagatatggttgcaggagagcagaagccccaccggggaggcgaatgacagtcggcagtcactccggtcggtggagagcttctcgtaacgggtgtcggtagccaccttgcccggcaggtcttccgcgtcggagagggtgtgcagacacaggcggttgtcgccgatgcgcatctcccttgccgaaagctcgatgtcctgcaaggtggtgtcaccttccggcatgagcgagaagtagcgttcaataagtcccgtctttccctcagtacccacaatctcatcggtggagaggcggcgcagcctgacaagcccgctgtcgttcatgatgcgctcgaactgttcgcaggcttccaagaacttggtcgtggtttccctgtccagctccttcgggatgatatgtccccggcacagcgtgctgaaattgctctgcatccggttacgctcctttgttgtcttggtcaggtagaggtagcaggtgtgtttcaggtacggacgctcgttgaagtgacgctcgaaagagcggcttaaaaagctcatgtcgtccttctgaagctccggtttgtagcgttccttgatgaaccagtcctgtttgtggacgacggagtagtccggcagcaccttgatagccttgcaccagcaactgtgtatcgcctcgtactccgcacccgtcacggtgtaaagttccggtagttccacctcgaaagccaccgtgatgtcggcgtcctttgagatgatgcagccatgctccaccgctaaaagtgggaacctgttttccagtgttgtcattttcgatgtattcctcattgtctttcttcctttcgttgtcgtttgaacagacgggttatccgccgccggttgataaggtatcggggatggctccgtgccgctcctaatttcatcagcccgtgttcaccgtaccgggcgttcagcgcgaaggtctgccatacaaggagggaggacgatgccgcgccgaagccgatacatatccactggtcgataccgaccatgtagaggatgacgaacaggacgaagagagccagcagacctccgcagaagatgaagaggtactgtgccttcaagcccttgaactctaccggacggccgatacccttgttgattgggtattcagccatacattatttattaaaggaagaatgagcgcaggatggtggcggcaacaatcaggaagatgcacgcgccgaaccacgaggcggctgtcttgctggtgtcggggtcgcccgatgaaaacttgccgtacacttttacgcccccgataagcccgacgactgcaccgatggcgtatatcagtttagttccggggtcgaaataagaactcaccatagaggtggcttcgttgatgcccgcgatgccgtttccctgcgcgaaagcggaggcggttgcggcgatgacaagtgccgcggagaggattgcttttctgtttttcaagatgttcttgttcataaactgttcttgttttttgccgtcaaaagggtggatggtcctttgtcgggcggttgatactttgtttctttactttggttttagtggatgcccgtttgtttccacggacgtgggcgtgtccgttgcggatggggatgcgccttgcgtttcctcgccgcgtgggttgatgtcattctttcatgttcatttcttttattgttgtcatacatagttgcgaatgtcgaactcctcgatgttgtccggcacgacgaactccttttcagatttcttcagccgaatctcgataagccccttgatgcggatgcctatctccgaagagccttccatcattttctcgtacaactccgtgccctccatgtcggtgaacaccttagccgccttttcacgttccgcctgtgtcgcgtccgggtttttggcggtcttgcaggcgtcgtcaatctcgtcaaagctgctgcccgaagcccgtggcgtgtccgaggcgtcctcttccggttcgtcgtccccgtatcccagttcctccggcggtatgctcgtgaaggtctcatcgagtttttcctccgggacttgtgccgggcgggatgcgtttcccgtttttccgtcgtcaaaagtagcctcttcctccgacagctcaatgcctttttcaatagtggcggcttcttgcgtcggtatggcagcggttgtccgggtggatgccatcctgaaacggctcttgccgatgatgtccgccttttccgcagggacttcctcgtgtgccgctatgcgtttagcctcattcccgtccagtgaccgccataatccgacaatgcccttgaagaagcggacaatccgcgtgtccatgatgcgctcgtaaaggagcaggaacaggaaccagaggttgcagccgaccgataccgccagcagaatgtctgtcatgctgattgtgtaattcatatccttccgtttttggttagaatactgaattgtaatttcgggcataaaggctctttatcgcatcttcgcactggttgaagtggtgcgtcagcacatggtcgatgtaagcggacagcgtaagccggtcatgcccgattacacgggtgatacgcatgatacgctcgtggtactccgggcgcacatacgccatcttcccctcacgtgcctttacttccgggtcgcggatgaacaggcgttcatagtccttctcactgcatttgccgcttaccgggacaggcgacagtatttccacactcgcctgcacttgggtaaacatacctccgcagtcttgctgtggtcttttttcattcggtgtcatttctttttccattttcaaatcagatcttcacgttgtttcttgtacagttcgttgattctctccttgtgctgttccagatgctggcgcagcacggtatccacatatccgcctactgagatttcccctccggcgatgtcgttcacgattctgaggatcttgccgtggacgtcacggctgatatagacacattggcgggtctttatctcgttgcggcgcaggaatagctcgttgtagtcctcgtcctgccttttccggcgtccactttccctctgcgctttttcccgtgttacgggttgcacaggagatggttccggtgcggcggtgtcctcttcggtcggtgcagctgcgggtacttcctgtgcggggcgcagtgtcccgtcctgtgtgcgccgcccgatggaggctaacagcagttcctcgtcgatgccttccgtgttcactttcctgctgcccatgctcactgcggtctgatgatgtcgcttatctcttcggaaaactcccggatgccactccctttcagcagtgccgtgtccatcgggaagatggtggagcggaaaacgctcttgcgctcttccgaaaggtcacggcggaacttcttgctgtcgggcaagcgggtggaaagtaccggaaagcccatttcggctatcacttcctcgtagatgccgtacaagtcgttcctctccctgccgtccaccatcgtccagaacagatgcagcccctttgttttcgcctgtccggtagtcatcagcctgtcgcggaacatcgtgacgaatttcagggtactctccacgacaaagcggtcggcactcagcggagtgaaaatgtagtccatctgcgagagcgtctttatcacgccgttgcttcggagtgtgccgggcatgtcgaagaacaccacgtcgggtttcacgtcctcagtggcaatcatcctctcggcatcgtcgagggcgttcaccgcattgcttttgacgatggtgtaggcgttctttttgatccggcggaaatggtcgcaagcgagagccttgaagtaggtgctgctctcgataagccccatttcgtgttcgcgcagcccgtggatgctgtgctgcgggtcgtcgcagtccacgacggcgacattgtagcctttcacgttgtgcaggtagctggcggcaagtgccgtgacagtggatttgccgatgccacctttctgtgttgcgaatgcaacgaagatttccttactcatagttccatttattttaattgttgatgatttgtttttctgtttccatacggatttggctgtcgcaccatccgcttccgtgactacacacgcaggcgggtcgtcgcgtatccggttctgtggtgaagcggtgcgtcggacaaatggtgattgacgacattgcgtcatgaagtcattgaatccatacgtcaccgaattgtcggagaaccgggtttccgacggttcgggtatccgtttcggcaagtatccgaagaagcggatttccgggtatttgaatgttccgtttatcatatcttcaaatcgttcgtttcttgaatcatgctgcaaataaacaagtatattttggaacctgtatcacttctccggcaagtggcggcacgttgcgccggttggcagtcattgaccgggtcaagcatctgtccgataccgctttaagggcgtaactttgcacccggacagcagggttcgccgatgacgcgcggcccggagtcctgaaaggtattttcccaatccgtcccctgacggatttttatgttcacctgaacatagcaagatgtcttttcagccgctcaaaatattttgagcagccacgaaaagcacttgcccttgcagggggcgggctttccctccgaagtcgggaagcctttcagaactgcggtgctgtaatccgaagcggcggcttatgccgtcaatccgctaaatccaaagtaatatgaaagagaaaaggaaaagcaaatcagggagaaatcccaaacttgatccggcggtgtaccggtacaccgtccgtttcaacgaggaggaacacaaccgtttcctcgccatgttcggaaaatcgggtgtctatgcacggtctgttttcctcaaagcgcacttcttcgggcaaccgttcaaggtgctgaaggtggacaagacgttggtggactattacaccaaactgtcggattttcatgcacaattccgtgccgtgggtacgaattacaaccaagtcgtgaaggaactgaggctgcatttttcagagaaaaaggcgatggcgttgctctacaaattagagcaacacaccgtcgaactcgtgaaactgagccgccggattgtggaactttcaagggaaatggaggcaaaatggtcgcaaaaatcagtgtaggaagttcgttgtacggcgcgattgcctacaacggggagaagattaacgaggcgcaggggcggcttctcaccaccaaccgcatctacaatgacggttcgggaacggtggacataggcaaggcgatggagggttttctcaccttcctgccaccgcagatgaagatcgagaagccggtggtgcatatctctctcaacccgcacccggaggatgtgctgaccgatattgagttgcagaatatcgcccgcgagtatctggaaaaactcggtttcggaaaccagccttatcttgtattcaagcacgaggacatcgaccgccaccacctgcacatcgtgacggtcaacgtggacgagaacgggaaaaggctcaaccgggattttctctaccgccgcagcgaccgtatccgcagggaactggaacagaagtacggattgcatccggcagaacgtaaaaatcagagattggataatccgttgcgcaaggtggccgcatcggcaggtgatgtgaagaagcaggtaggcaacaccgtgaaggctctgaatgggcagtaccgtttccagacgatgggcgaataccgtgcgctcctttccttatataatatgacggtggaggaagcgaggggcaacgtgcgcggacgggagtatcacgggctggtctattccgtcacggacgacaagggtaacaaggtgggcaacccgttcaaatcctcgcttttcgggaagtccgcaggctatgaagccgtacagaagaagtttgtccgttccaaatcggaaatcaaggataggaaactggcagacatgacgaaacgcaccgtcctttccgtgctgcaaggcacttatgacaaggacaaatttgtatcccaactcaaagagaagggcatcgacaccgtactgcgctacacagaggaagggcgcatctatggggctaccttcatcgaccaccgcacgggatgcgtgctgaacggttcgcgcatgggtaaggagctttcggcgaatgccttgcaggaacacttcaccctgccatacgccggacaaccgccgataccgctatccatccctgtggatgctgcggacaaggcacacgggcagaccgcctacgacagtgaagatatatcgggcggtatgggcttgctcactcccgaaggtccggcggtagatgccgaggaagaggctttcatccgggcgatgaagcgcaaaaagaagaaaaaacgcaagggcttgggtatgtaatcagagtatcaacaattaaaaaatcaatgtatgtcacaacaagaagacgatttgagggcattggcgaaaatcatggattttctgcgtgccgtgagtatcattttagtggtcatgaacgtgtactggttctgctacgaagccatccggctgtggggcgtgaacatcggcgtggtggacaaaatccttctgaacttcgaccgcacggcggggctgttccattccattctctacacgaagctgttttccgtccttttgcttgccttgtcctgtctgggtacgaagggtgtcaagggtgagaaaatcacttgggggagaatctggacagcatttgccgtcgggttcgtgctgtttttcctgaactggtggttgctgcccctgccgctgccgcttgaagcggtgacgggactgtatgtccttaccattggaacgggctatgtctgcctgttgatgggtggtctgtggatgagccgcctgttgaaacacaatttgatggaggatgttttcaacaacgagaacgagagtttcatgcaggaaacgaggcttatcgaaagcgagtattcggtcaatctgccgacacgtttctattacaggaaacgctggaacaacggttggatcaatgtagttaatcccttccgtgcgtccatcgtgttgggtacgccgggcagcggcaagtcctatgccgtggtaaacaattttatcaagcaacagattgaaaagggctttagtcaatacatctacgatttcaagtatcccgacctatctactattgcctacaaccatttgctgaaccacccggacggctacaaggtaaagccgaagttctatgtgatcaacttcgacgacccgcgacgctctcatcggtgcaatcccattcacccggattttatggaagatattacggatgcctatgagagtgcctacacaataatgctcaacctcaataaaacgtgggtgcaaaagcagggcgacttcttcgtggagtcacctatcattctgtttgccagtattatctggtatctcaaaatctatcagaacgggaagttttgcacgtttccccatgctatcgagtttctgaaccgccgttacgaggatatatttccgatactgacctcttatccggagctggagaactacctttcgccgttcatggatgcgtggcttggaggggctgcggagcagctcatgggtcagatagcgtcggcaaaaatcccgctttcgaggatgatttcaccgcagctctactgggtgatgtcagacagcgagtttacgctggacatcaacaatcccgaagagccgaaaatcctctgcgtgggtaacaatcccgaccgtcagaatatctacggtgcggcactcggtctgtataattcccgtatcgtgaagctcatcaacaagaaggggatgctgaagtcatcggtcatcatcgacgagttgcccacaatatacttcaaagggttggacaatcttatagctaccgcccgaagcaacaaggttgccgtgtgtctgggctttcaggatttcagccagttagtgcgtgactacggggacaaagaggcgaaagtggtgatgaacactgtcggcaatattttctccggtcaggtggtgggggaaacagccaagacgctctccgagcggttcggtaaggtgttgcagaaacggcagtccatctccatcaaccggcaggatgtttccacctccatcaacacgcagatggacgcgctcattccaccgagtaagatttccgggcttacgcagggaatgtttgtcggttctgtatccgacaacttcaacgagcgtatcgagcagaagatttttcattgcgagattgtggtggatgccgaaaaggtgaaacgggaagaaagtgcctacaagaaaattcccgtcattacaaacttcacggacgaggacggcaacgaccgcatgaaggaaacggtgcaggcgaactaccggcgcatcaaggaagaggtgaagcagattgtgcaggaggaactggagcgtatcaaaaacgatccggtgctgtgtaaactgctaccagataatgagactgtctaacaagtccccaaaattgaaaattatccctatcgaagtttgaagtgacccccaaaagttggatacaatttttttggggggcacttcagttctgacgggtaaaatcgtaaaattcggacttgttagacaaatacttacgcggtttcaacctcaggtactgaatctatcgaattgacaaatttaaccaattgcggatctgaatctttttgtatgaggtttcggagactctttttcaattcataagcatcatcccctgctgtatttattaaatccatataaaaatctttgttttgcagaatcaatgaacggcatgccccatcggaaattacaggtttcactattttatcaataacgtctccagcttgacttttcaaattaccatgcgatctaagccatgtttcgaaaaattgaaactttattgcattgatagtctttttaccgatgcagaaatcatttcttatatcggtaactgtcgatttaatttttcgtttatccaatctttcaactatattcttgaaacaattagggaaaggattcaaactttgagttccagaagcaatatccatcagaatctttttgccaaattcagtcaagttatctggcaaggatttgattttagccagtaaatgttttattgcgacaaaccaataatatgatgtatgtgctgttctttgggcgtataatgtatcaacacttatttcagacaacgcttcgaacgctattttattgatatgatcggtcaggacattgcttattttagtggtcaaatcgtaaaaagatgcgtcaggaattacatctttaatattgttcttagtgatatacttatccaaatcggtattccactctgctaaatgctcgataaatacctcatccgttacacctattctgttcttaatatcttcaaattggggcaatatgtctgagagcaataatttatagccaagtttatgatttaccatgtattgtagtgtttcatttaatagcggtatattccatcccacactatttactaataagtctccatgatccacataatagtccatgagttctgcaacatattttatatctccaccctctattaaggaaacggaatgaccatgtgccaattgcatggcgactaaatcgtaatatccagactctttaatgtttcggccatcagtttctaattcagaatgcaactgatttatgtaggttgaatctaacgttacaggtaaaggtctttcttcgtcagatgccaataaacgataggttgtaaatatagcccctatattatctttatttacattctgttcatcaatgcaattcgtgatcgcttgcaaaagcgttggaaacgtataggtagaattatcttttaacgtttttacaatatctgcatggtcgaaattatcgggtagtaagtttgccaaataattatcgagcgcctccgaatttgttgctacttgataatatttatatgctttagttgtcgcgttatcccgataggcagcatctgttgcatttgcagcttgaatataatcgataaatgtatttggcttgactgtttttgcttcaatcaatgacgtaaaatcgcacgccaacttattttgcgcaataaacctgtctattgcatctaacgttttgaaatagtcgccgccattgaagtcattgaaccgaactatcttcttatataattgagcaatcacatggttttggctttccgtgtctaaatgcaacagcagttcttggtattcgacagggaacacctgcttctctatggattcttttaatttcaattgtgctattctttgccatacacgcagaataacatcgctctttcgagttaatttatgcaaacaatgtataatcttatcgataagcgcattgtccatacattgtataacttcttctaatacagtgtcaaattatttattagtctctgcatattgatttatgtcgtggtcttcttctccgttgatgcagccttcaatatattttttcaatggaatttgtcgagcatcttcaacatcgacaccatataccaaagctgcaatttcgcgttgtgtttgcagatcattgttaattattgtttgaatgccattcagatagtcgccggacaatatttgttctactggatttgccagaatatccgtcttcttcaaacagaacaatgctatgtttatcatcaaaatttcgttacaccactcttgtttaagagcgaccatctcattgatatatgatataatttccctaacattggcattaggatttaccaatctgaatatccgatttatagtttctttcgcttcattttctgtttctccaaatgcttcaacaaacagtttgttgaatatacttcgatagtcggtaataacaggaggagcaacacgataaacaatagggaaagttttattgataaaatacttggtcagttgtttcgtttgttcgtcggtctcatctccgaatgcacaagctaaatgtgtttcatcgaaaggaataacagcccaaacattttcaaaaccgctatcggcgaagaacgtatggatagaagaccataattcttttactttttcagcggggagacgatccatgttgtcaaaaacaaggactaatttacgttgtcctttttccttgataaaatcagaaatgtcttgcatccatgttttgaactcgtaaaccgttggttcgtcttcgctcaaagtctcatagcaaacgtccttttcgactttatcttgataaatagctaacatataactccatccatatttatgatctttgctatatgcccatttccaaacgcacaatgcaataagaactggcagtgcagctatgataatagacaataaagaaaaccaccatgttgtgggtgtaggttttactgcatacgcaataaatgtaaatatcggagttaaaactgcaaccaaaaatgccgcaaccataccattactgataaggggatatttttcggttacggtctccgttttacgggctaataaatatttcagcttttcagaccatgatacggttttcgtacctccacctttgacttttattgttgcatttccagataggataccatcatcaataagtttgcttgtaagcaattccaatatagagcggcgttgcaagtcctcttgatgtccccatgcgtcatactcaaaaaagtaatagtcgtctgataattcacgttccaacattttaaccacgttggattttccagatccccaaataccttcgatgccgataattcgaggtaaagtacattcctcatccaatgaatcattctgacaaaaatggcgagcaatagtttttgccaacctttcttgcgaacctccatcgaatttgtcaataccacacggtttattttggataaaccgcggatattgctgtttggattgtagttttgtttccatatacgtaatttattgattatacgaactccaaataattctcccgatttaccacatgaaactcggcatagggataggcttcttggaaggctttcggtgcggccggcattttatttccccacttgaactccaaggcggtaagactgtcggcactctcctcaatcaggtcgatttcctgtttgtcgtaggtgcgccagaaatagaactccctgtgcagtccctcattgaagttcgctttgcgccgctctccgatgatgtagttctcccacagcgcaccgacatcctgccgaatggccagcggtgagaaagccccgataatggcattgcgaatgccgttgtcgtagaagtaccacttgccagcttttgtaacctccttgcgtaggttacgcgaataagcccccagacgatagataacgaagaccttttccaataggtcgaggtatttttcaacggtcgtcttgctcatgccgagttgtttacctaactcttcgtaagaaacttcgctgcccaactgaaaagctatcaatcgcagtagatcgcgcatcttgctcgaattttttaagccgtcaattgctaagatatctttaagcaggtatgcaccgacaatatcacgtaggtagtctgttttacgttcatagttctccatcattactacttcgggataggaaccgtaaatcaagcgcgcttcgaggttctggcgggtttcaagtgccgtttccgtctgtgcgatttcccgttgcgagaatggtgtaaggagaaattgcgtactgcggccgaccaacggttcaccagtcttattcagcaaatcgaatgacgaagaaccacttgccaagacacttattcccggtatttcatcaactatcaacttcagaatactaccgatttgtggtatgttctgtgcctcatcaatagccagcaaatcaataccatccaataaatgccgataattggctattgagcgattctccaatagtgctaatgtgtcgtagtcttcgccgttgagcatcatcgtcctacctgaatagttgtccacaattttacgcatcattaccgttttaccaacacggcgagcaccaaaaatcagtactgctttattgggcgcgattcgtgctgtaatcttctcttgaagtattctatttactgtttccataccttataaaatataatgcaaagataatcatatttttttaattggcgaattttacaaaaaaaacgggctattaaatggcgatttttacaaccacaatcttatggaagttgtttcattgtttttagtaatgatatatgttcatactatgatgactcaataatttaccagacatacgtttctgaaatttgtccttataggaatgaaaaactcacatatattgtgctaattaatatataattaaatgaaaataaaaagacaggatacgagtattcctgtcttctcatatgtaatggatatttttttattttctcatccgctccaactcctcatcacgcaacattctctcgttcagtttttcctgcatcctgtcaatgaaataggtgcggctttcgttcttccggcgtttgatatcagtgtagaagcggtagcagtctttagaatcaaccccgaatatcttatagagaagtggggcgagctgtttgagcggcatattgccgttgttgatgcagcccatcacgtctatgccgtagataagttccacgaggtcgatggcattgcccgtccattgaagaaggctggcggtggtttctgttgcgttgttggcggatattagtggtggcacttggggcgtggcaaggaatttctgcatctttcttacgaaagacagagccttgctgacgtaggcggcaatctctcttttttcttctgacagattacgtacgggatggtgctgcaactcgatttcgatgtaggcaagcgcgatgacggtaaggttcatgtccatgccgccgttgcacagttcgatcacttgggtggcgaaagccgtgtatgccgtttccatattgcagtcgccggcttcgtttatcaggcggaaaaagtcggtttccgccagcaagaaataattcatggttctgtcaattttgaaaattacactttgttttctgcgtgcgcacatgaatataattggcaaaaaacgcggcagaaaataaaaaatccaacgctcaattttacaaagtgctggatttcagaggtataaaattcagtattttttcacaaggacaaattatctccgacttaaattgtttgtaatcggaacatttattctattcctgaaaatagaaatgtatgcttgccgcacattttggctatcttgcttttttatcaaggatatagataatgcgacatacaccgttgggatagcttttcaaagaggaaagcgtccagtgttgctctggcagagccgacttaaaaaaatgtcgtccgcttccggatatgaaaggaacggtgtatagtatgatttcatccacagcgtgcatccgcagcagtccgtttatatagtctgccgtgtccggtgtggcttccgcgaggtaacggatgtttgtgcagtcttttctccattcgtgcagcattgaaatggaatagtccggtgtcacacggtaaaaggctttcttcctgatttcatcaagaccgcaacggtcaaggcacaaatcctgatgtgctttatcatataactctgaagaaagacatccgtccatcgtcagtacggcgagaatctgaactttacccataatcgtttcctttcgttaggcaagggtaaaaaagtagcgtgcaattcacactaccttcaagcgatggctctggtaaagcctttacggagagtacgtgaatgcacgctatgcgtaagcatagcataagcatcacgcaatcgtctccgtagttccaatttaccagatttacgcagtatatatacaaaatgcaaacaacacccaataaagtgataataaataagctataaatcagtgttttataagcctatttttattttcagttgttttcagtactttcagtgaattggctcttatttggtgcaattttgtttcttatttgtttcttaatctcgatacttatccgtatatttgcaataggaaaaatgagaaaggaatccctatggcacgagttaagaatcatacaaaagtcaaagagccgattcgtcttcggatgaagccgttgagcgatggcagcaagagtctatatctggatatataccgcgatggaaagcggacgtatgaatacctcaagatgtatattatcccggagacggataataatgcccgtaggcagaatcaggcgacaatggatgccgccaatgccatcaagtcgaaacgtattatcgaactgaccagcaatgaggcaggaatcgtattccgtaaggacaagacttatctgttggactggatgaaggtttacatggaagcccaagagagtgcgggcaagaaagacggcaaccaaatcaagattgccatgcgcatactgaaagactatgccggagaaatggtcacactggatcagattgacggggacttctgccggggctacatcacttatctgttgacggaatatcatccgaaaggcaaggacatatcaaactacacgcttcacaattattaccgtgcgttgaacggtgcgttgaactctgccgtcaggaagaaaaagatgaaggccaaccctttcaacgagcttgagaagtcggagaaaatccgtaagccggagagtatgcggtcgtacatgaccatcgaagaggtacaggcgttgattgacactcctatgccccacgaggaatacgagatagtaaaatgcgcgtatctgttctcctgcttctgcggattgcgcatcagcgatataatcaagttgaaatggaaagacgtgttcgttgaccggggacagtaccgtttggccgtgtccatgaaaaagaccaaagagcctatttacctgcccctctctcctgaagcgttgaagtggatgccggaacgtgggggaaaatcatcggaagataatgtgttcgacctgccgtccgccaatacaatcaggatgcagctcaaaccttgggcgaaagcagccggaatctccaagcggttctcctatcacaccagccggcatacattcgccaccatgatgctgacgctcggcgcggatttatataccgtctcgaagttgctcggtcatgccgacgtaaaaatgacacaggtgtatgccaagattatcaacaagaagaaggacgaggcagtgaatcttgtaaacggtttgtttcactaattgacggcactatgtggttcatgtctaatttacaaacatcaatttatggcattgctccggttgtgaacgcaaccgaagttaatgctttcatcacatattataaactcaaaaaggtaaatcgacatgaaaagacctgaagacggccttctctctttttggagggagccaacacctgcagcacttcgctgcggagaaggatgtggcgaatgaacttttcgccctgctaaccgaagcaaaaacagtttatctccacgatgttgtgtcgggtggtaaacagtaccaccgttatgtggacgatttcgtaaacggacaccggtacatagactgcgaccatgcggcctgccggaactgccacgaaatgaacatccacatcgtcaaggggctgctgaccgagtacgcccgtttcgtccagatttgctttgctacgccgaatttcacgtttgacgagtgcatgaagctgaaacggatgtatgatacctcggaatcgttgcctccgctcggtccgccccacattgaccgaccggcagatctctccctttcttttggctgtgattttaccccggaacagatggaaagtattgtggcttgtgccaatacttatcatctgttctgtgtttctgtacgcattgaagacatggaggctcttttcgcctgtaagaaaggcttttccatccgagtgaacaatatccgccgtgtggtaatcctgttcgacgcgcttcttgaaaactcgcttatccagtcccggtggcagaatgttctcggcaagggtgcattcctgcagtccaaggacgggacacgttccgtttcggtatcgaccctgtcttccgcgctgtcatccatcaagaacaacatgacatcggtcgcatacggcatccgaaagaccattgaccggctgaaagaatgacaggaagtgacaagaagcgaagtatgtgaaaggtaaaagcatgagagttgcaatgatacgcgcatagtatcattccccaaatcacggcatcttcgtttaccggacatacctttgacctccgttagcgcgctgcataacggaggttgcatctccattgtcaaaaatcaaaccatgttattatgccgaatagaatgacattcatggagcggatgagcggacggctcgccgccatcgaatcggtactaaagaaattggaaccggtcgaaagtctcttggagcgtatcacgttgctggaaaataccatcttcacgaccaagagagtgttcacgtttcaggaagcctgtatgtatatcggggtttctgaaagtatgctgtacaagctcacatcgagcaaggagataccgcactacaaaccgcgcggtaaaatggtctatttcgccaaggaggaattggacgaatggctgttgcagaattatgaacctacagtgaacgaggccgtgcgcatggcgacggaagccgccgccacagaaccgttccttaataagagacgcaatggaaaacgaaagaaagactgaccgctcagccgatatgggaatggatgaacaccgcctgtcggacatccttctggcctcgcaaatcaaggcaacggacatttatgagaccccgccgcaaatcatctggatagacaactcgacgattgccacgctcggcaatttcagtgcatcgacaggaaaggcaaagtcgaagaagacgtttaatgtctctgcgcttgtcgccgcttcattggccgggaaacaagtgttgaactaccgtgcgcatctgcccgaaggcaaacagcggattctgtacgtcgatacggaacagagccgtttccattgccgctcggtattggagcgcatattgcggctggccgggctgcccacgacaaccgacccggagaatctcgacttcttctgcctgcgtgaatattcgccgtcggtgcgtgtcgaggtcatcgactatgcgctgcgtcagaacaaaggctatgggctggtcatcattgacggcatccgcgacctgatgcttgacatcaacagcaccggtgaatcggtggaagtcatcaaccggatgatggaatggtcttcaaggtacgacctgcatatccattgtgtactccatttgaacaaaggggataataatgtgcggggacacattggtacggaaatgagcaacaaggcggaaaccgtgcttgtcatcagcaagagcaacgagaatcccggtatcagcgaagtccatgcgctccatatccgggaaaaggagttcaagccgtttgcgttcaccatcaacgagactgggctgcccgtcattgcggaaggacactcgttcggagagcccccgaagcccaaggctcggacggggttcacggagctgagcatcgaacagcaccgggaagccctctccgccgctttcggggaaaagcctatccggggattcgacaacctgttgcaaagcctgatggtctcctatgaggcaatcgggttcaaacgtggtcggagcgtcatgataaaactgatgcaatacctgatagacaacctcaagctcatcatcaaacgggacaagctgttctattatgacatgacgcctaccgaggccatgctttttgatgaagaatgatgccgggcgcgggcctgtatgatttagtttactttagtatttatatatataggaaaaaactaaactaaaccattttcgtgaaaccaagtgaaagaaaaaagacatgaccatagcagaagcaaaacaagtgcgtatcgtggattttctggcacgtctcggtcaccatacgcagcacataaaatcgggacaatactggtatctctcaccgttacggaacgagcgtaccccgtcgttcaaagtgaatgaccgcatcaatgaatggtacgatttcggcgaggcgaccggtggcgacctggtggaactggcaaaatacatttgccggacggactgcgtgagcgaggccctggcgtatatagagaggcttgtgaatggcgcatcactaccgagaacccgtatgctgaccgctccaccccgaccggtggaggctgaaatgaaagacgtgatcgtgattccactccgtcatcacgccctgttctcttacctccaatcccggcttatcgacgcggacatcagccgtatgtattgcaaggaggtgcattacgaactgcgaggccgtcattacttcgctctcgcattcggcaatatatcaggcggttacgaggtgcgaaacgcctattacaagggatgcctgaataacaaggacatctcattgataagacatctgacagaagagacacaggaaaacgtctgtgtcttcgagggattcatggattttctttcttatatgacactgaaactggcaggcgaccggacggtctgtcttgccataccatgcgactacctcgtgatgaactcggtaaacaatttgaaaaagacgctggcacgtttacaggagtattcggacattcactgttatctcgacaatgaccttgccgggcagagaaccacagagaccattgccgggatgtatggcggacgtgtcagcgatgaatcttgccactatgcggaatacaaagacctgaacgactacctgcgcggaaagaaacgctgatattcaatgttctcttttgccacctaaagctctccaccacgagagctttttttatgccccgatttctccatttcccaccatagagactgcaatatagtacgatttaatagttcgatttttgaaacttacacaaatctcattaacgaaacagatgtttaatgctcaattattttatggttttatatttcgtacgtttctttgcaaaatcatactaatacgaatttttaatattcatactaaatacatgaactcatatttcatttttgccattgtcctgacggttgcctacatcatttactacgccgtcatcatagcgcatgacctctacgggaaaaaggggacggacaaaccagacgaggaagttttcgacctcggcgcaccggaagaggaagagagtgtggctgtcacggaaagcgagagcggcttcagtatcggtagcgagaactacgagacggaaagtacggctacctcttccgaaacatcccctgaggaggacatcaaggacaaaccgggaacggcgcaggagaaactggaacggctgaaggccgaggcggaggaacagatggaagagaccacgccttacctgtcggacgcacgcacgtcggaggagatgtacaaggctatgatttccaagggacggttagacaaccgaccggaaataaagtggaacccaattcaagaccggttgtgagatgtcgaaagctaaaaagattctatgtgcgctgtgcctcccgttcccctacacggcttttgccaaaagcggcagcgtgaactatagctggggagcggacgcgttggccacgatgcacgacttcgtggtgacgatgatgctctatgtccagtatatctgttgcaccatagccggggtttacgtcatcgtgtccgtttgtcagatatacatcaagatgaacacgggcgaggacggcatcaccaagtcgataatgacgcttgtcggcgcgtgcctgttcctgatcggggcattctatgttttcccggctttcttcggctaccgcatataaccttacttgtatcaggtcgcagacaaataaaatattcactaaaaaagtaaacgtatgtttcagaaaaccaaacagctgtgccgcaaggcattcggattcgtcaacggaatccctaccaaagtaatgatgttctccttcatgctgctgtccggcatggtggcgaaagcgcagaactccgcaggcgactattccgccggtacgagcgcattatccactgtcgccgatgagattgccaagtatgtgcctattatggtgaaattgtgctacgccattgccggcgttgtggccatcgtgggtgcaatctcggtatatatcgccatgaacaacgaggagcaggacgtcaagaagaagattatgatggtcgtgggagcatgtatcttcctcattgcggcggccaaggcgttgcctctgttcttcggtattgccgcttaaacatcaaggataagtatgaaaagcaaggacgaacgctatccggactatccgctgttcaagggactgcaacggcctcttgagtttttgggcatccaaggccggtacatatattgggcggcggtgacgacgtgcggagccattgtcggctttgtcgccgcctactgcctgctcggtttcattgccgggcttgtcgtgctggctaccgtcgtatcggtcggtatcgtgctcatccttctcaaacagcggaaaggactgcatagcaagaaggtcgctccgggtgtgtatgtgtatgcccactcgcgcaagatctgacgaaagaaaaaccatcacggcaatgtgcatggctttattgattgttgaacgcgggcgggtttgtcttgaagcaaggcgaacctgcccctatttaattacacgtatatcgaaatgaccctatacatcattttatgttttgtcgctttgtgcgcgggtatggccttgtcggtctatgcgttcggtacgggcggcaagcgcaagcgaatctttcaggacatctatttctcagcggaggaaacggacggtgtgggtgtgctgtacaccaagaccggcgaatattccgccgtacttaagatagagaatccggtacagaaatattcggcggacatagatagctactacgacttcacgcacctgttcaccgcccttgcgcagaccttaggcgaagggtacgccatccacaagcaggatatcttcgtcaggaaacagtttgcaagcgaaccggctgacgggcaggagttcctgtcggcgtcgtatttccgctacttcaaagggcgtccctacacggacagcctttgctacctgaccatcacgcaggaggcgaaaaagagccgcctgttctcgttcgacaacaagaagtggcgcgatttcctcgtgaaaatccgcaaggtgcatgaccaactgcatgacagcggcgtacaggccaggttcctgaacaaagccgaggcgagcgagtatgtcgaccgctacttcgccatgaacttcaaagaccgcaccgtgtcgatgacgaacttcaaggcggacgatgaaacggtgtcgatgggcgacaaacgctgcaaggtgtacagccttgtggacgtggactgtgccgcactgccctcgatgatacgtccgtacacgaacatcgaggtgaacaacacggaaatgccggtcgatctggcttcggtggtggacaacataccggacgccgagacggtggtctataaccaagtcatcttcctacccaaccaaaaacgggaactggcgatgctcgacaaaaagaagaaccgccacgcgagtattccgaacccgaacaaccagatggcggtcgaggacatcaagcgtgtgcaggaggtcattgcccgtgaaagcaagcaactggtatatacgcacttcaacatggtggtagccgtatctgccggtgcagacctgcaaaagtgtacgaaccacttggaaaacgcattcgggcgcatgggcatccatatcagcaagcgggcgtacaaccaactggaactgttcgtcggttcgtttccgggcaactgctacacgctcaatgaggaatacgaccgtttcctgaccctttccgatgcggcgatgtgcctgatgtacaaggagcgcgtgctgcacagcgaggaaacaccgctgaagatttactacaccgaccgtcagggtgtgccggtggctattgacatcacgggaaaagagggaaagaacaagctgacggacaactcgaatttcttttgtctggggccttctgggagtggcaagagctttcatatcaactcggtcgtgcgccagctccatgagcagggaacggatgtggtcatggtcgatacgggaaactcatacgagggactgtgcgagtatctgggcggcaagtatatcagctataccgaagaacggcctatcacgatgaatccgtttcgcatcaaccgggaggaatacaacatcgagaagatagacttcctcaagaaccttatcctgatgatttggaaagggtcggacagccaaatccccgaaattgagttccgcattgtcgagcagataatcatagactactatgatgcctatttcaacggatttacaagatacaccgacgagcaacgggaggtactgctgaaaaacctgtttgcggcggccagccgaaagaacccaaacaaaccacccagagaggtggatgagatggtgcgcaaacagatagaggtgcttgaggcacggcgggcggccctcaaagtgacggagctgagtttcaactcattctttgactactcattcgaccgtctggagcagatctgcaccgaaaacgacatcacgacaatcagctactcgacctattcgaccatgctgcagccgttctacaagggcggtgcgtatgagaaaattctcaacgagacagtggattcggcactgtttgacgagacattcattgtctttgaagtggatgcaatcaaggaaaataagaaactgtttcccattgtcacactgattatcatggacgtgttcctgcagaaaatgcgcatcaagaagaaccgtaaagtccttgtcatcgaggaagcgtggaaggccattgccagcccgctcatggcggaatacatcaagttcatgtacaagaccgcccgtaaattttgggcttctgttggcgtggtgacgcaggagatacaggacatcatcggcagcgaaatcgtgaaggaggccatcatcaacaactcggacgtggtgatgctgctggatcaaagcaagttcaaggaacgctttgacgaaatccgaaagattcttggtctgaccgaggtggattgcaagaagatatttaccatcaaccgcttggagaacaaggatgggcgcagcttcttccgcgaagtgttcatccgccgggggacgaccagcggcgtgtatggcgtggaagagccgcacgagtgctacatgacctacacgaccgaacgggcggaaaaggaggcactgaagctttacaagaaggaacttcggtgcagccaccaggaagctatcgaggcatattgccgggactgggatgccagcggtatcgggaagtccctgccttttgcacaaaaagtaaacgagacggggcgtgtgctcaacctccgtcccgtgtatgaatccaaataagcattgcagccatgaaacgactactccttatcctgaccatcgcctcggtcgcactctgccagacggttcacgcccagtattacagcgtgaactacgacacccgtaccgttgcggcgatggtggccgccttcggtacggaagcggtcgccgaagggtactaccgggagcaggtcgatgacatcctcaagcactacacggcagcggaggtcgctaccgccgggatattcgcggccaagttcttggagcataaagccctgagcgacctcggcatctggaacagccgcacggagaactactactaccggcgcatctaccggatggtggcggagaaaatcatgcccaagatatgggtggtggcgaagcagatgctccattcgccgcaaacggctatctattggggcagttacctgatgaaagtctgcgacgataccaaaagtctgtgtatgcagttcgagagcgtggtgaccaacagcacgctgaccttttcggacatcgcctttctcgaaatcaatccggagattgcccccttgctaaagctctccgaaacgggaaacatcgactggcagcggatgatggacaacttcgcccacataccgggcaacttcacgcacgagaacctgaaaagcgacctcgacaacctttataacacgggtgtcggccttgcaacggcaggcattgccaatctcggtgacgccctgttgcaaagcagctcgttccatgacctgatgggcggaaaggttgaagaaatcggcaacctgtatgaacactacgggagtctattcgagcaggcggaacatgacatcggcggcttgctgattgacatggtgggtggtccggacaacgtggccggtctgttcaacttcagcaactacaacctcacggcatggatgaccgactacctggacgaagcgatggggaactattacacgcagcggtggtacattgcccggcgtgaccaagggagcgtatcgctgtgcgactactatcctccgacggacgacaacagcatcctgaacgggggcgcatgggtgcggttcaacacgagcgacccgaatttctatcccaacgcctcgcaacgggaacaggtacttgccaactcggaaggatatgccggttggtcaagaaaccgcgtgcagcagttgaacaaccagaacgacgggttcagctacagcatcaactattggatgagtgcctatatcatcagcaagaaaaacaagcagaccaaaaaggcatacgcatacgaaatccatgtgagcaaaagctggaataaggaagaagttgtctatgaggaagtcttcgattcctactcgatggacttgaatacgtttcgggcgcaactgaatgtccgacttgcggagttcaacgaaaacgaggacggctacacctattatatatcttccggtacgcggaactattaccaagcaacggacgccgccaaattgaagggatgcgagagcgtgaccatcagcgtgacctgttccgacggggttacgctcggacagggctcgacacaatacaagtgccgtaaatgcggcagctcgttgaatgcccacaccaaggagtgcgccatgcagacctcggtgacggaaaacaacctcgacctttcggaactggatgcgctgttgaacgaggcaaacagccaagcggccaatcttgaagcgcaaatcgggacattggaaaacgagaacgctgtcctgctgaagaaaatcagtacggcgagcattgaggatgcggcggcttaccgacagcagtataatgcaaacaagacacggatagaccgtctgaaaggcgaactcgcggagtggaagaagaaacagtccgactatgctcaggcgaagtcggaagccgcagacgacaacagcgtagcgacggatgactattaccgcattccagctatcatgcaagactgcaaggctgcctacggcctgacatggcaggacggcggatcgtggaacggctattcgtatgtgcgcaaggcgacaatgccgaacatcaacggcatcatcacattcaaggctacggtctcgattgcccgcaagccgaaatattttctcggcatcaagattcaccgtgccatcatccaaatccaatgggaactgacctcggtctatacggacacgcacgtcgccgatgtgctgacactcgatccggggctttcggatgcggagaaaaccaaattagtgaacgaccgcatcgccgaaatcgcccgtgaacacccgtcctgcaaaatcacgacggaatacgcccgcagcacaccgctggaggaaactccgtccggcgacgtgtaccatctgctgtggtcgagcgaccgcctcgaaatcgcgagggaggtggacagcagaatcacaaggatatacgccgacttggtatcgctggaaaagatgatgcactacaagcggagcatccttgacgtgatgaaggatgtgttgcccggactggacacggacgaaggccgcaggctgacgctcgtggaggaatgccatgaccgctgggtggagagcgcacggacgtttcggaacgatggcggcagaaacggcggaaaggaggtgcggccatgaaacgcattttacggatagccgcattgctgctcttcctgctgcccggtatcgccaaggcgcagtggactttcgatatagtctccgtcgaagcctacatcaacgaccacaagaagcagcgcagcctgttgttggcccgcagtaccttggagtacagcaacaaactgttgcacgaatacagctgtaaggaagtcgggggctataaagagctgaatatcgaccttgaccggtacacccgtgcgttcgatgtcatcgacgtcatgtaccagtcgttgcgcacggtgctgaacgtcaagaatacctacacatcggtcagcgaccgtatcggcgactataaatcattgttggaggatttcaatgcgaagatattgaaacggggacgcatcgaatccgcagataccctgattatctccatcaatgcgagggggctgagggcgattgcccgtgagggggaacagctctacaagtccgtgagcgacctcgtgctgtatgccaccggagcggcagcctgctcgacctccgacctgctgatggtgttggaggccatcaaccgctcattggacaacatcgagcggcatctgaaccgtgcgtatttcgagacatggcggtatatacaggtgcgtatcggctattggaaggcaaaggtatatcgctcccgcaccatgcgggagattctcgatgacgccttcgggcgttggcgcggagccggaagactggattattaacgacaaaaagagaagaatatgaacagaaaactattactcatggcggtggcggtcaccgtaacgacagccgtacacgcacagtatgtaacgtacaaccatgattcgccgaagcagaatcaggtaacggtcatggagaccggtacgggcgcactctcgcccgacctctattattccgtgctgcacaacaaatacaagaagtcggcagcggccaaaaacaagctctcgttccgcacgcttgccggtatcaatctctacaaccaggtggacgaagcggaagccattgattcggccttggtcaagcgggcgaaggtcgaggcgttgaacgttgccgaccggcaggtggacatcgcatggcttgccgagggcgataaggtcagcggacagatggagcggttccggcgcaacatcgaccgtattctcctgtccggtggcactccggccgacaaggaacggtggacggaatactaccacgtctatcagtgtgccatcaaagccacgaaagacgcctatatgcccaatacccagcgaaagaaggagtatctgcgcatttacgaggatgtggcacggcagaacgagattttagtgggctaccttgccaagcgtcagaacgcaacggtgacgaatgcactgctgaacgcaacggacaaccgtaccctgcataaaggcggtattgtccgcaatgccatgagccggtggcaggaatcacgccttgcggtgcgtggttcgcaatcgggcagcaacggaaacggcgaagatgacaacgagagtgtaaacagagggaaataaaaagacagggctatggcaaacggagatatactttcggatttcggcatcaacctgttggaggaggaaatagatgatgtcatctttcagaccaacgagtttctgactgacgcgacttttaccggtgcgcagggacctttttggtggatattgcagatgtgcatggcactcgcggcactgttctccatcgtcatggcggcaggtatcgcctacaagatgatggtaaagcacgagccgttggacgtgatgaagctgtttaggccgcttgccgtgtcgattatcatctgctggtggtatccgcctgcggacacgggtatggcggggagccggaacaactggtgttttctcgatttcctgtcctacatccctaactgcataggttcgtacacccatgacctgtatgaagccgaagcttcacagatatcggacaggttcgaggaagttcagcagctcatccatgtgcgtgacacgatgtacacgaacctgcaggcacaggcggatgtcgcccacacaggcacatccgatcccaatctgatagaggcgacaatggagcagaccggtgtggacgaagtgacgaacatggaaaaggatgcggcgaagttgtggttcacgtctttgacggcaggtgtcatcgtggggatagacaaaattatcatgctgattgccctcgtggtgttccgaatcggttggtgggcaacgatttactgccaacaaatcctgttgggaatgctgacgattttcgggccgatacagtgggcgttcagcatcctgccaaaatgggaaggtgcttgggcgaagtggctgacacgctatctgacggtgcatttctacggggcgatgctctacttcgtgggcttctacgtgctgctgctctttgacattgtattgtgcatccaaatcgagaacctgacggcgataaccgccagcgagcagacgatggccgcctacctgcagaactcgttcttctcggcgggctacctgatggcggcttcgattgtagctctcaagtgcctgaaccttgttccggacttggcggcatggatgataccggagggcgacacggcattctctacccgaaacttcggcgagggcgtggcacagcaggcgaagatgacggcaaccggagggttgggcggcatcatgagataatccgcaaaagataatataaacccaataaaaatcataacaacatgaaattgcaagagaaaatcaaaagctggtgcaaggatgagaaatttatgtcctttgcacaggaacgagcgagaaaagaggtttgcgaggtggcggagaaccaccgcatcgacccgcagtatgaagaactggacgaagccttcgagtacgacgaccggtacatcgcccccttagtgacgtacctaacgtacaagctgcgtcttgccctgctgcagcggaacgctggtaagcgcaaaagaggaatctggtgggtgcttgtccatgtggagatgcagggctattacgtggagatattctcggcggagttcgagaatcttttgacggaacttcgggatgcggtcatacccatgctgcacacggaatatgtacagatgttgaacggtaaaagggaataaccgatggtcatcaagaatttggaaaacaaaatcagactggtgggcatcatctgtaccgcttttctcgtgggatgtgtcatcatcagcttgtcaagcatctggacagcccggacgatggtctcggatgcgcagaagaaggtgtatgtgctggacggcaacgtgcctatcctcgtgaatcgcacgacaatggacgaaacgcttgatgtggaagccaaaagccatgtggagatgtttcatcattattttttcacgttaccgccggatgacaaatatatccgctatacgatggaaaaagcgatgtatttagtcgatgagacggggttggcacaatacaacacgctcaaggaaaagggtttctactccaacattttgggtacgagttcggtgttctccatctattgcgacagcgtggctttcaacaaggagaagatggagttcacctactacggacggcagcgcatcgagcgacggagcaatatcctgatgcgtgaactggtgacggcaggacagctcaagcgtgtaccccgaacagagaacaatccgcatgggctgcttatcgtgaactggcgtaccctgctgaacaaggacatcgaacagaaaacgaagatcaactactaaacaacggagtttatgaatatcaagggattcaggcggatgctcttcggtgaaaagatgccggacaagaacgatccgaaatacaaagaccgttacgagcgggaggtgtccgccggacgaaagttcgcccaagcgacacgtatcgacaaggctgccgccaaggtacagggattcgccaacgcgcaccggatactttttctggtcatcgtcttcggtttcgctatcggagggttcacttggaacatctatcgcattacgatggcataccgcaacagccggccgacacgcacggcgacggaaatgcaggattcggtgctgcgggaaagacacaagaggctgcaagggggtgaaataagggaaaatcggaacgagaacaagaaatatgaaccgcaataaaggagtgcttatgaatacacgatttgaaaaatcagtccgctcgtcggacgaatggtacaccccgaaggaggtgctgaaagcgttaggcaggttcgaccttgacccttgcgcccctgtccgtccgttgtggccgaccgccgaggtcatgtatgaccgggacatggacggattgtccctgaaatgggaagggcgtgtatggctcaatcctccgtactcgcgtccccttatcgaacagtttgtccgaaagttggcggaacacggcaacggcatcgcgctgttgttcaaccgttgcgattccaaaatgtttcaggacgtcattttcgagaaagcgacgggcatgaaattcctgcgccaccgcatccggttttaccgcccggacggaacacgcggcgattctcccggttgcggcagcatcctgatcgcattcggagtggaaaacgcagaagtgctgaaaaactgcagcattgaaggcaagtatgtacaactcaattaaaagatgtatgatgaagatatttgataaaatcaatttcagggagccgaagtatatgcttccggctgtcctgtatatcccgcttctggttgcatcgtacttcatcttcgacctgtttcagaccgaaacggcggagattccggacaagacgctgcagacaacggagtttttgaaccccgatttgccggatgcccggcttaaaggcggtgacggcataggcagcaagtacgagaacatggccaaatcatggggtaagatacaggattactccgcagtggataacatagaacgagatgaacccgatgacaacaaggaagaatatgaatcgcaatacacggtggacgacatcgccctgctcgatgagcaacagcaggaaaaggctgcggcagcgcaaattgccgatgccaagacgcgcgagcaagaagctctcgcggaactggagaaagcccttgccgaagcaaggttgagaggacgcaatgaggtattaccggcgaccgatacggacagtaccgcatcggcgcaacccccgacggcaaccatagaggttaagggaaaaatagaggaagagagccgttcggtaaaagccccgtcagagaacgaaccgcccagcgaagtggtacgcaaggtaaagacggcttcggattacttcaatacgcttgcggtcaatgcccgtgaaccgaaactgataaaggccattatcgacgaggacatcaaagcggtggacggctcgcgtgtgcggttgcgtctgctcgacgacgtggagatcaacgagtgcgtggtcaaacgagggtcgtatctgtatgccaccatgagcggcttctcgtcggggcgtgtgaaggggaacatcaccagcattctcatcgaggacgaactggtgaaggtcagcctgtccctttacgacacggacggcatggaggggctttatgtaccgaacagccagttccgggaaacgagcaaggatgtggcaagcggtgcggtgtcggggaatctgaacatgaataccggcagttacggcaacagtctctcgcaatggggaatgcaagccgctacgaatgcctaccagaaaacgagcaatgccatcggcaaagctatcaaaaaaaataaggtaaagctgaaatacggcactttcgtctatctggtgaacggacgtgagaaacagtaaaaacggaagccatgatagagattgacaacatatataatatggactgtatcgagggcatgaagctcatggcgaacggcagtgtcgatgccgtgatagcggatttgccttacggcgtgttgaaccgtagcaacaaggcggtacactgggacaggcagataccgctcgaagcgttgtgggaacagtaccgcaggatcaccaagccgggaagccccgttatcctctttgcgcagggcatcttctcggcgcggctcatgctctcgcaaccccggatgtggcggtataacctcgtgtggcggaaagaccgggtaacgggtcacctgaatgccaaccggatgccgctacgccagcatgaggacatcatcgtgttctacgaccgtcagccggtatatcatcctcagatgatgccgtgtccaccggaacggaaaaatcatggacggcgcaagacggacggtttcacgaaccgctgttacggtgaaatgaaactggctccggtgcgtgttgccgaagacaagtacccgacctctgtcatttccatacccaaggaacacaagacaggagcattctatcatccgacacagaagccggtagccttgatagagtacctgatgcgcacctataccaacgagggcgatgtggtgctggacaactgcatcggttcgggtacgaccgccattgccgccatccgcacgggacggcattacatcggattcgagattgaaccgacgtattgcgaaattgccggacgacggattcgggaggaactggaacgtggtcatgggattaaagaaagcgaaataagggaaataaagaaataaaaaaataaaaaatatcaacagaaacgatatgaacaagaaaataattataactgcatttcttctggcggcaggactttttgccacacggaacgcacaggctcagcgtacatacgaagagatggaacggctgactgtcaatgaacaggtaacgaccgtcatcacagcctcggaaccggtccgcttcgtggatatttccacagacaaggtggcgggcgaccaacccattgagaacatcatccggttaaagcccaaagagacgggacacgaggacggtgaagtgctggccatcgtcaccatcgtaacggaacgctatcgcacgcagtatgcactcatctacaccacgcggataagcgaggcggtggcagacaaggaaattcagctacaggaacgggatgcctacaacaatcctacggtctcgatgtccacagccgacatggtgcgttttgcaagacgggtgtggaactcgcccgcgaaaatccgcaacgtggcgaccaaggcgcaccgaatggtgatgcgcctgaacaatatttactcggtgggcgactacttcttcatcgacttttccatcgagaacaaaacgaacatccgtttcgacatcgacgagatacgggtgaaactgtcggacaagaaactttcgaaggcaactaacgcgcagaccatcgagctgactcctgccctggtattggaacacggcaagacgttcaagcacggctaccggaacgtgattgtcgtgaaaaagatgacctttccgaacgacaagctgctgactatcgaaatgacggaacaacaaatcagcgggcgcaatatcagcctgaacatcgactacgaggatgtgctgtcggccgattcatttaacaccgctttattggaggaggaatgacgatgaaaaagacgttgaaaacagttttgttactgatgcttgtctgcatagggtttgccaccaatgcccatgcgcaacgcaacggcggccgcctctcgctcggcgtgggattgctgtatgagaacggcatggacgtaacgcttgcttacgagcatgaaatgaactaccgtcatgcgtgggagttcttcgccaacggctatctgaaatggacggaatgtaaatcttgcggtcatatttgtccggaatccttctggcgcaactaccgcacttatggtttcggtgtggcgtacaaaccttgtgtggtgcgtggacgcaaccattacggcaacttgcgtatcggagcttcggcagggagcgacacgaacaagtttcttgccggaatccatgtgggttacgagcacaattatgagctgcggtcgggatggacgctgtactggcaggtcaagagtgacatgatgataaaaggggcggatttgctgcggacaggtatcgtgctgggtgtaaaactgccgataaaataaaggaaaaacaaaaaaacgaaaatgacatgatacgaaagattcaatggattgcaatggtagtggcggcggtattgtgcgctgcctgtgacgcccatatcgacgtacccgatacggcggtacgtccggggcatattctctgcgaggacggcacggcattgtcctatgcgcagtatgaacaatcggggaagcgggcaatagcggttgtctttgataccgaacgccgtgaaggaacggaagggaacggctatgcggtttacctgtgggacattgctccggcggcattcgccgacagcctcggtgtcgcacaagggacgtcggccgacatcggggcattggacgggaacatgaacacctttgcgctgtacgacacaagggagacggcttcgcctatggcggaagcggtctttgacctgtggcggtacggacagagtgcctatatcccgtcggtagcacagatgcggttgctgtatgctgtccgggaaaccgtcaatcctgtcattgaacggtgcggcggtcatccgttgccgttggatgaatacgattgctggtactggacatcgacggaagtgtccggacaagagacggcgaaagcgtggctttactcgacaggaagcggcgcgatgcaggagacacctaagacacaggcgcataagctgcggcctataattaccatgaacaaataaaatgtgcaacgatatgaatatagatatgcttttctgtatagtattgatggtattgggggctttcctcatatactatcccatcaaagatgaatcacctcggcaaaaactgaaaaagctcgccgattctgttgcgtctgataaaaaggacattgattatctgattcaacgcttcagctaccttttggataacatggcggcagacaatgggaaaggttcggctctgagatgccagattgccaaattggaggaagttgtcaaggagttgaacggcaaacgcaaggaacttgagttaaacaaccggtcgatgacggatgttaatgacgaattgaagcgaagcaatgccgaacttttaaggaaggcttctgaattgcgtgatgagatacagcaacaggaaattaaaatccaacagcaggaagaatacatcaattctgtccagagagtcaaagaagggcttgagatagccttggacaacattcaggcagaagaggtgcattatctctcacagccgatattcagcatgaaaatgacgcctatagtcagaagcaaactcgaatctcatgggatattgtatgtcggcgacctgattcagctcaacgaggaatatctcatggaaatctggggtttaggaccggtagcacttgaaagaataaagacgaaactgaacgaaaacggtgtgtggttcggtatggatgtcatacgaatcaacgaccgttggtatcgtcggaaacaagaattaacaacggattgattcatggaagagagcaaagaattacaagggttctacaagatattccgtgcggtcatctatatctccgtgctgatggagttcttcgagtatgccatcgaccctgccatgctcgaccactggggtggcatactgattgatattcacgggcgcatcaagcagtggatgatttacaatgacggtaatcttgtgtacagcaagattgcgacgttcctgcttatctgcatcacctgtatcggtacgaggaacaagaagcatctggagttcgatgcccggagacaggtgttatatccgctaatcagcggactgttcctgattgtgttctccgtgtggttgtaccatcatccgatggaaacgaggctctacacgttgccactaaatatcatcttctacatggcgaccacgcttgtcggtgtgatattggtacatatcgcactggataacatctcgaagttcatcaaggagggactgggtaaagaccggttcaactttgagaatgaaagtttcgagcagagcgaagagaaggttgagaaccagtatagcgtgaatataccgatgcggtactattacaaaggtaaatttcgcaagggatgggtgtcgataagcaactgtttcagaggaacatgggtagtcggaactccgggcagcggtaagacgttcagcatcatagaaccgttcatccgccaacatagtgccaagggctttgcgatggtggtctatgactacaaatttccgacacttgccactaaactttactatcattacaagaaaaaccagaagctcggaaaactgcccaaagggtgcaagttcaacatcatcaacttcgtggatgtggagtacagcaaacgggtgaaccccattcaggcaaagtacatcaataatcttgcggcggcgagcgaaacggcggaaaccctgttggaatccctgcagaaaggcaagaaagagggaggcggaggcagtgaccagttctttcagacttctgccgtgaactttcttgccgcctgtatctactttttcgtgaactacgagcgggaaccctacgatgcaaacggaaagaaactatatgcggagaaacggcaagatccgcagacgaagttctggaagccgacgggtgtcgttcgtgaccgtgagggtggcagcatcgtggaacctgcctattggctgggaaaatactcggatatgccgcatatcctttcatttctcaatgagagctaccagactatttttgaggtactggagacggacaacgaggtcgcgccgttgctcggcccgttccagacggccttcaagaacaaggcaatggaacaattagagggtatgattggtacgctgcgtgtctataccagccgtttggccaccaaggaatcctactggatattccacaaggatggggacgacttcgacctgaaagttagtgaccccaagtcacccagttatctgctgatagccaacgatccggaaatggaaagtatcatcggagcgttgaacgctctgatattgaaccgtctcgttacccgtgtgaacaccgggcaggggaagaatattccggtcagcatcatcgtggatgagctgccgacactgtatttccacaagatagaccgactgataggtacggcgagaagcaacaaggtaagcgtaacgctgggttttcaggagttgccgcagttggaggctgactacggaaaagtgggaatgcaaaaaatcatcacgacagtgggcaacgtggtaagcggttcagctcgcgcaaaagagacactggaatggttgtcgaatgacattttcggcaaggtagtacaggtcaaaaagggcgtgaccatcgaccgggataagacgagcatcaatctcaatgagaatatggacagccttgtacccgcctcgaaaatttcggatatggcgacgggatggatttgcggacagacggccagggatttcgtgaagacgaaaaccggtacaggaggctcgatgaacattcaggaatcggaagagttcaagactacaaagttcttctgcaagacggatttcgatatgaaggagataaaagcggaggaagcggcctatgtaccgctaccgaagttctacacctttaagtcgagggaggaacgggaacgcatcttgtataaaaatttcatacaagtcggacaggatgtaaaagacatgataacggatgtactgaacaagcgtggggcgaaataaatcaaaatccctgcaataatcacgaaattattgcagggatttttatattcaatttcagttacccaaaatcttgtgggcataaagccggttttacggacgtaaatgaattatctgacagtttccgatttggaatcgttttccgatagcagattttgtaatttgtcgatgtccggtagagtcttgcgcagattctccggcatttcttgggctgtgcggtatgtcgccacgcccataggcttatcatagtcgcgcaccatgatttcgacaaacttgcggttggcatcctggcataggacaataccgattgaagggttctcgtgcggtttcttgtcggtcatgtcatacaccgtcaggtagccgctaagctgtccgagataattcgggcggaacttgccccgtttcaactccacgattacgctggcattcagttctctgttgaagaatacaaggtcagcaaacatttcttctccggcaactatcaggcgatgctgactgtcgataaaagtgaagtcgtttccaaaacggagaatgaactgcttgatattggttacgatttggttttcgatgaccttttcgttccagtcctgttcgcgttctcccacattctccagattaaccatttcgagcatatactcatccttgaacgccaatatcgcttttacggcataaatggcttcgggcagcacttgaaggaagttgctcggcaaagatccgcgatttgaatagatgtcttctttcaagtaatttttgagagaggatagcgaccacgcattttgagcggcacaatggatatagaacaaccgttccgcgatgtcttttgaacgagtcaggatttcaatatgatgtgaaaagctgatcttgacaaaatcgtcccaggtaaattcggtattgaccggttgcccgataagttgcagcagtagatgctcgtcaatatccaattcgcccaacgctgttggatgaattaaagccgtacccttttccgacgaatggttttccaattcgcccaacactgttggacgaattaaaaacgtcctccattcctcatagaatgagcgcatccgtttcaaccccgattcagaaaagccgtgcagaccgggcaactcccgttgaaggagctttgatatggtaggcaatgctttagtaccccaacagccgatgcgggaattttcagacacgaatttccccactccaaaatacaacgagagagtttctttgttgaccgcagccgcacttctataccggcagcgttcgatggcatgtttgattatctctactgcctctgcatattgtgtataatccgatgggataacctgttgttccatatacatacgtttttgtgccgcaaaggtacgaaaaatacgggatatacagggcagaatgccaacatattatagtgccgcgtgggtcttattcggtatttttagcgttccggtgtcttgcactcgctttgctgccaatctactcactcagatgttcatgcgtctggggcgtgccgagaaagctggtagcggtgtggataagattgtgagcggttggcagtctttgggttggccgcttcctactgtagccgaggaaacacgtccggactatgttgtgctgaccttgcagttagggatgaaaacccgacaagaaaacccgcaagaaaacctcgcaagcaggatttgagaaaagagcaaatcttggagttctgtgttgagccgcaatacctatctgatattttgcaacatttaggattgaaagatagggaaaatcttatggaggtctatatcaatccgatgattggtacaggggtattggaaatgacggagccggacaatcccacaagccgtaacaacggtaaaagtggaacaaggacttcaaaagtgagtttataataggatattgcggcttggacgcatccaaccgcacacgaaaacaccgcccacgtagaaaaatgggcggtgttattcggtcgctcgcttattcaggctcgtgtaccgcttaaaagtacggcaagttgccggtcgcagaatttgtcgtattcctctttgtccgtaccgctttcgacggctcggtcaatgacatcgcccaactcgtcgaagcatacttcctcattgacgcactccgcaccgttctctttcagcagatatacctcataataatcggagccgttgagtgcgataacgacatttccggcgtgcaaccgcccgtttactttaatccgcaatgccggcaaatcccggaataccgtagcgacaaaatcgccgattccccacgacataagaatgggcatgggtgtaagtgataccaattgttctttgatggtctgtgcgatgtgcattacatactctttatccataactttgatttttaatatgattattgatttatgttagttgaaccattcggggttatcctcttttaattccgtgatgagttcatcgtccggtaatttgagggttttcgcatcggtgaaaaagaaaacctcgtcatatatttgttcggcttccttacttgcaaaaccttcgttttcgtcctcgaaactgcccggatgaagtgcatcgagcagagcggtagagccgataagtaattcttcaccttcgttggatttcacgatacggcagatgtagatattgccgtcaaattgtagttctttcgttttcatacatctgttatcttaatgggatgtgtttcccgtgagccttgaggtattccatgatgcacttcgcttcctcgtgcgatgcacggttgcggtcgtcgtagttgcgtgtctcgtccgccatgaccacgatacactcttttaccaacctgtaaaggctttgctgcagtgtggggtgcatttcggggatagcggctgcaaaccgtttggggttgaagccgtaatcgttcactgccctttcccagtctttggcgagctggtactccttgctttccttgatgttgtccataatcttgaattttaatgatttgtttttttcttccctccgttcggttcctttctgtcggaaccgctttgggattttatggatgcggtacacggttgtcggtacagcttcatacggaaggcttttcctgccaattactctttctgaggaaaggaagaatttgcaggaaattcactttaagccgccggatcaagcgcgacggccgacctttgcatctgataaaaccaaaccggggctgacaggggacgaagccggggaaacgctataaaagggaagttgaaaatggtaaaaaagagaggaaacggaagctatgaatggaagaagggcgggtggtgacgggttcgtcagaaagttagaagaggtacttgggtcctttgtccggagcatacaaaaatgaatagagggcggatttctccctccccctatccgttatgacaacaacatttgtcaggcagctatttcttccgcttgcggttcggtctgtgcttccgcttcgggttgcggttcatcgggttgttccgcttcctgcgtggcttgttcctgcaaagcggctttcttttcctcgatgcgttggtgtcgcttttcgtacacttcattatatccgtcttggatattggcaagttcttcgggcatatgcttttgagcgaagtcaagcaacagggaggctgtggcgttgttaccgaatgcgtccttgaaattggcaatcagataatccctgcggataacggctttctgcttggcggtaaggttctcgatgatgcgcattttgtcctcgctcgtaaggtagtaataagagcctttatcttcaattcccacctcattgaaatgctctttgcggagtgaggagagcaggaagaaatacaccattttctcctcgtcctgcccaaatttgcgctctgacatatcgacctctaaaatccgctttttggtgtcttcaacggtcttttcgagggcaatctccttgttgcgtttgtcctgcttttccaacttctcgataggtgaaagcggcattttggttgccgtaccgtttgcggttgtagcggtatttgcaacatagcacagtgtaatgtcgttgctctcaatacggagatagagggagatttctcctgcttcgcttcgggtgcggattgcttcgcatttctcggtgtagccgttcaatttctgctcgtaatcctttactgcttcctcgtattcctcggtggtatcgtaatcctctttttgaggagcttgggggcattcggggtatttcgttgcataggttttaagactttccacctcgtagcctatagcggtaagtcggtcgacgacggcttcattgtaattgtagctttcgtggcagaggggaacggcagggtgctgttccatgagccgcatagccttttcggtaaggtgcgatgtgttcatttccacaagacaagcacggttggcgcaatttccgcaactaccctcacagaataacatcatgttattggtattgtggggacatgaaagacaaagggttttgtcaaatgaatagcgattgaggtctgcggtatattgccgttcgatgctctgtgccacctcggaggctttcatgcctcgccaactattgtactgcaccccctctttcagatgttggtcgtacacctcacgctgtatctcttccccataacggcagatttcacttgccacgctgattgtgatttcgtcctgttccaacagcacggcgatttcgggtatcaaggaaacgaatttaagtcgtgtacggatatacgcttccgtcttgccgaactgcacggtcaaggattggacatcgtggcgaccgctgtctatgagtttttggtaggcattggcttcctcaatcggggtaacatccttgcgatgcaggttctcggtgattgccatttcctcggctgtctcgtctgaaatttccatgacggtagccggaatttccgccaattcagccatgagggaagcacggtatctgcgttctccaaagacaatctcgaaacggttgtccgcaatagggcgcacaccgataggctgaagcactccctgctgacggatgctctcggcaagttccgcaaggcttgtctcgtcaaagttcttgcgtgggttgtaactgctcgactgaatgtctgccaatgctaccgatgtgatgttcttctctactgcttgaactgctgttgttgccataatcataaaatttaattggttgatatttgttttgttatttttccctcttttcggttcttttttctgcctgaaccgcttgggatttacagatgcttcaagggactgacgaacaagctattttcaacgctttttccggaaaattactctttcacggaaaggaagaattttacgagaaatgcacttcaaagcggtgaaatcaagcgcggcagtccaaatttgcgtctggaaaaccaaccggcgatggcaggaacgagaccggacaagcggcaagaggaatggatagaaaggggaaatgcagcattgcagctataagaggcgaatagagcaggagaacagccaggggtataaacgggaaaaccgctaccttgtggacatgtgccataagatagcggtatggtataaaagttgattgggcggattgccgccccggttatttctcgtgcttttccaaatactctttcatcgcctcgttcacaatatttcggagcgacatattcttctcgatagcgaggtatttcatccgggtatgaatactcttgtcgataacaaaattgcaatgcacggcaggttctttttccgctttgaccggtgcaggctctttcttttgcgtggacttcccggtggatgacagcaagccgtccagtccgcttctcatgccgtttttcaatgaatcacttttgctcatatcgtctttactttaatttcaacacttcttttgctaactccatgtagtcctttgccccgttgctgttcttgttgtattcaaagatgttcagaccctttatcggagcttcggccaatgccacattgtcccggatgacggtcttgaacactttgtcgcagaatgattcgttgatgagttccgcaacactcttgttgagcgtcttgcgcttgtcaaactgtgtgatgacaattccgccgatgttcagattcgggttcaaacgggttttgacaatctcgaccacatttgtaatcttcgccattccgcgcatggcgaggaattgcgcctgtaccgggataatcaagaaatccgcagatgtaagtgcgttgagtgtcagcaaacccagcgagggcggacagtcaatcaggatatagtcgaatttacgggtttcaagcaattttgcaatcagccctttcagtattaattcccgccccggctcattgataagctcggattctgccgctgacaaatcaaggcaggacggtacaacggaaaggccattatttaactcgaataccgttaacgggtattcacctttcattgctccgtacaccgtccgttcctcttcgatggagagaccgcaggattccgtgaggtttgcctgaccgtccatgtcgatgagcagtacacgctttttcttctgctgcaatgcggcagcaagattgatggtggtggtcgtctttccgacaccgcccttgtggttcaaaacagcgattatctttgccataaattcctatctttatttctgatacaaagatactactatttttagtatttactatgattagtgtgtactattttactactttattacattttagtatcgtagtatctactactatactaaaatactgattgactaaatgtagtgcatactatcctttgcaacgggagatttcctgatatcctactttactaacattagtatgtactacatttagtatcgactgtatagcagtgaagtaaagcctatttgggaggtgtatataaatggatattgccgccatcagatcggagtacaagaaaaatccccctgtcgagttatcgcaaccgaacagagggaaaaggttaagatatgattatggtttaagcggccttagtagtaggttcgtattcggcagccgttgtttcggatggagttagagagcgttccgcatccttgagactttcgtcaatcttccgctgcagctccttgcactccagtttgagttttaccaattcatcggctttgctccactggcggccaacgatgtcctgcaatatggggatttcgctttcaatccgctccaccgtcttttgttgcttctcaataagtgagggcaatttgtttagtgtagcctgcggatattgagcagattccacgaagccaagcggtaacgcacctgtcagtccacaacggtatttaagcccgcttgtcccctcgacaaagaacgtgtttcggtcaaatgtaccgtttatgctgtactcgctgcgtaccagcaaattcagccctgtaaacgtgccaatcgtaccatacgctccgctacggtaggttttggcgatgcggtgtaattcccggcctgtttcctcggctgtagcttgtggcaggttgagaagttgtgttacttttgtcccctcgtaagagttgaagtattcccaatccttgatgaaaccggcctttgtacgctgtgtctttgccatatcttcctgtccggcggttattttccgctcggcacggatgcgttctttcttgaaaatggtctgttccttttccaactgcataatcttgttgtcgagttttgccttgttcagcaaatcggtgttgccggaaaggattgccacgaactcggcgaagttcatgccgttgtcctcgtccatgccgccctcgtcgatacggcgcacggcgattgtgccgttattgatttggttgatgaacatctgcttgtttttcagcaaattgaatttgtaggcatcaagtgtcttttccgtgccgtaaatcaccacatccaccacgttgccgccccacagtttcacggtgttgcccttgcgtaccgccctgccgttgcgctgctccatgtcagccggtcgatcgggtaggtcaagggcattactgccctcttcccccctcagaaccgtacgtgagggtttcccctcatacggctcaagcttttcaaagtctctgttcgtgtgcagagaccggctcatcctacttcttgtttccattgtttttacgggataatttgaaacattcatcatgaaccaacagattgcatttccgtccgtcttggacggttggcattacgttccatgccttatacgtgtcaatcggttcaccacatatcggacatttccgcccttgcttttcccataggtaaagcagggacttacgtcctttcagtgtcacaagcatctttgacttcattcttttattgaagtacaggcggcagtctgcgtcaaacggattcatatccccttttatctgcgtatattgcaggaaaggaaacgaagatgccagtttcagcaaagtgagttggtcttccttgccgtttgatttcttgaacttagccgcaaaagtccagctgttccctcggatattgtgccaataacggtcttttatccaccgttttcctttcttggaatggcggcgtttagcccattgccacaaggcgagaaatatctgatggtcgattctgtgaaaagaatcacgtgtcgccccatgctgataatatgctccccatcctcggattttagcattcaacattctgattaatgattcctgcttgcaacccttatgaccttttgtaaccttacggatattttccataaagcgtttttcggctttcttggtcggctttgtcaatatttcattgccgtatttgcgaatattgaaaccgaggaaatcgaaaccgtcacgaatgttggttatcaccgtcttttcttcggataaggtcaaacctctttcagacataaagtcggctaccaatggcttgatttctttttcaagtgtttcacggttctcgcaggtaattataaagtcatcagcatagcggacaagattcaccattggcgaatataacttgccttttattctaactcgtttatatttctctgcaaggactttctgcaatccgtccaatgtcatattggcaagcgtgggagagataatgccaccttgtggcgttccctcctctgtcgggaacatctgtttgttgaagatatagccgcatttcaaccattttcggagtattgctttgtccatagggatgttggcaagcaaccattcatggctgatatggtcgaagcacccctttatgtcaccctccaaaatccattcgggagaatagcctttccggagaatgttatgacattgctgtaccgcatccatacagcgacgttccttgcggaaaccgtacgaacgtgtgtcggctgttgtttccgacactggttccaatgccatgaggtaaagtgcttgcatggctctgtctttcattgtcggtattcccaacggtcgcagtttgccattactctttttgatgtggactcttctcaatggcttcggcaggtagcctctgcgtttgagctcacttatcgcttgtgtttttgcttcgggtttctcccatgtttccatgtccaccccgggggtgctaccacctccgttagaagtaactctctttacggctaaggcttttgcgtaaaaagagtgggtcagcgtccactgcaaggctttcaccttgcccgttctgccttccttctgagcctttacaatgcgagcttgaagcttcttaacagcctgctccgctttggtccagtctatcctgtcccaattcgtttgcaagttatcagtcggtgcacacgattggtcgaggagtttttctttgattttatcgttcatttgcattcctactttaaaaaagttctaaaagtctattgtaaagaatcaccatttggcaacattcggtttgttttgcctaccgagtgtcgccacagaagtctgcccactttcgtgtcggatgatgtcgcctacatcagcccgtgatgtcggttcaatccgtatccgttccattacagaacggcattcgctttttctgttatcttatacctgcacaccattcggctttcattgctgtcagcttacctgccatttttacatggcaggagatatacaggcttaccatgttccacatagataactaacggataggttaggttctgtctcatcctccggcggtgcttatatccgtgtaatcctaccatggaaaggattaaccgaccgcttcccttttgggtagagtgtaccagtatcttacactctttcgtgacattacgaagtttactaacagttcgcttgcgctaaccatactatcctgcctcgccactctacggtatgatactaaccgtacttgacttcccctcacggttctgtcttgtcttgcgaaagtgtactttgtcccaaccgcttaatacaactattaaggtgcatcggtggtaggctaccgctgacggaacagcgggttaaagctgatacccgtaagtatcattccaacaattatctatgcgacttcatgtcgcacccagggaatctccaaatgatgcaccgctacagccctctgctgggcgttcacccctgttcctaacatggtggtgctgccgaaaagcacacgcaccttgccgttgttcatgtcctcgaacaggcgttttcttgccctttcggtggtagcacactggataaactgcacttcatcggtcggaataccgaggttcaccaacttttctttgatgtcggtatatacgttccactcattcggcttgtatgtgccgaggtcgctgaacacgaactgcgtaccccggttttcatttgagcgcatataatattcatagattgttcttgcacagattgaagccttgttttcggcatcgtcgctgaacttgtcgcccaacaaacgcatatcgagagccatttttcgtgccacattggtagctaccaacatttttgccttgtcgagattgtcgggttcgggcgtatcaagtcccaaatcctcccactgtccgctgtgtgcaaaggaaaccaaacggcctatcatttcctcctgctggatagtgggcgcatgagaaagaaagcgcacatttttatccggtacatcgaggtttatcatgtcggcggtgcggtagtcggtaatctcacgcaggaacattgccagttccggcactttgatgtaggtgcggaaacgctctttacgcttgattgcacctgtcacgttcagttcataatcggctgttttctgcgtaaatatcgccgcccacgcatcgaagcaagaaatctgctgacgttgcaattctcttggtctaaggtacttaaacatcacatacagttcggtcagggcgttcacaaccaccgtgcccgaaaggaatgttgcgccgaggtcacgtcctgtccggtgctgaatgtcacggatggcaaacagcaggttcatcgccctttgcgagcctttggtattgccgataccggcaaccctcgtgtggcgtgtctgaaatattaagttcttgaaaatgtggcattcatcgacaaatatgtggtctatgcccatcgagtgaaagtccaccgcatcgtctttccgctcgttgattttcattttcaattccttaagtttggctgcgaggttctgtttgcgcttctccagaccgtcctgcatctttccgctgcggtagcgcatggtggattgttccaagacttccaaattgcgctccacatcggccagttcttcggtgaatatatctatcatggtctgttccgattgcggtatcttggcgaactggtcgtgtgtcagaatgatgcagtcccagttgttgttcttgattttcgagaatacctctttgcggttagcaggagtgaaatcctctttgcccggataaagcacctttgccgaggggtaagccttgcggaacgtgtcggctatttcgtgaacattggctttcaagccgataatgagcggtttctgcaccaatccgaggcgtttcatttcgtaagcggaaacgcacattatcatcgtcttgcccgtgcctacctcgtgccagcagataccgccgccgttctgcttaatcatccaaatggcatctttctgtgagggatagaggctgtcatacggaaaattctcgaaagagagctgcgggaaggtctgtgccgagccgtcataatgcggacggacatagcagttaaaccgctcgttgtacacccttaccaattcgtcccttacctctatcggctgacagtcgagccactggttgaaacggtttcttatctcctgtatcttggtggccgcttcctgtatggcttcctcgtccggcactcgtaccgcttcgccgttccgctctatctctttggttatttcgggaacggtgtcctgcagggcgtgtacgaacaaatcctctccgttgtaattctttacggaataggtgttatagactacaggggaatatccttgtagccgcactaaataggtgtcgttcacgtcaaaatacatcacatcggtttccgttccgaaaagttctgtggcaaaatcggcgtacagcttcgtgtcaatccaacgctcgcccatgttgatgtcgagttcctcgtagggtatcgcttcgggtatggcttcctccaatgcctttacagcggtttccgtccagtccttttccttgcctgtgagatcgggaagataagagcctgtttccttgcttttggcgatgacgtttccggctatgaacttgcctttgtgttcccattctccggtggcagggttatagaatatctcgcctttgaggtcgtcgataacctcgtcctcgtccttgcctgtggtctgcatcagatagtccatatccacacagccgtaaaagttaaggcagcttgccaacgcttcgcccggtgtcagttgcacggtcgtgtctatcttcttgaacgctacaggctcacgcatgatgtcggatttgaatatgttgcccttgacctgcatttctattgtaaagacttccacgccaaggctgtcaagcatgataaattccttgttgtcgttctcgtggaaaaagccccatttggcgacaaaagcatcatagcaagcgttcagtcgttcacgcagttgcggctgttccatctgtttctcctgctctttgattgcaagttcaaagtatgccttgcggatagcgaaatagtcgtttgccctgtcggtgttcaccttgccctcgtccaccgggacaaaatcggtggccgtctcttggtagaggtcggatttgcggtattggataacgcccacctgcccctcgaacagtaccattgcgccctctttcatccacgcttccggctcgtccgtataggctcgtctgccttttggtggttgcttaacggccacactaccgaaaagggacatttgcgtgtgtatgccgtcctgtccctcacttgtgaaaaggcttttgcggaaatagcggccaaagtcgagtttgagcaatgcggcgaggtactgcgacatggcgttttcatcaccctgccactggtatttgcgtacatacttgccgtactggttcatcgcaatgcggctgcctgttgcaagggtggttttcgacaatgtgaaaagtttgttggcgtattcggtcattgtgcctgtcgtatctgccttttccctgccgacctgcaaaaagagctgttccctttgtgaaagtgatgccttgtgtgtatgtttttgaaatacaagtaagtcactgcctacctcgataccgcttgtttgcatgaaaagcatgtcgggcagacgaatggcacttatcaaatcagcatggctcacaaggtaatcacgcacgaatttgttgcttggtgtgtcggccacgccccttgatgtgacgaaagccaacagaccgccctcgttcaaaagctccatagccttgacgaaaaagtaattgtgtatggtcttggtagcctgctcgtatatgccgcctttcttccagagttccgcatcgaacacacggaagttaccgaaaggtatgttggaggctatgacatcgaatttcgtatgtttaaaaccctgttcgtctatcgtttcaaacccggctgtccgtgtaatcgtgttgtcattcagcagggagagtatcagacccgaaaccgggtctttttcaatagcatagccgcaggtgtcggacatggctaccgggaggaaaccgccaatgcctgcactcggttcgaggaatgagcgcatttgcagtccgttatccttgaatgtagtgtgtatttgttttgttaccgcttgaacaaggaatttcggggtgtagaacgctgtcaggacggaggctttgataccctccatgacgttgtggcgcatgggttctgtgaaatgtgggtaggtgtcgataagctcctgcaatctttgtatcggttctaccatgtcgccacttacaggcttttccgtgccgatgttcaatacttctttgataccgccaaaccccgaatatagggataaaatctctttttcctctgttgtggcttgtctgccttgaatgtggatttgtaacgctgtctttatcgcttccacgtttgccaccaatgatttcaatttgttgtaactcatatttaacctttctttttatttccctttgttcggtctgtttgcgaccgccgggaagatttttctgctttcagaaggtggtgagggacaatcggacaaggctgatccgaaaaaatacgctcgacagacggagaggaagatttttacgtgtcactcgcagcggcacgccggccttggcaagattggagcggccggttacctttgcggaaaattctatcccgtaggtcgcacggcagcggacttgggtttaatgggaatccgttagaaaaaggaaagattatgggtaaaagaataaggcggccagccgggacggacttttcgacggactgtcttgggactacagagggcaggatttatcccgccccctgtaatgccaagtctgtccgtgtccgtccttttgcaaaaaggggcttcacgcactttatgtaaggtgttacacaaaatgcgtgaggctgcttgaagcaaactggccgcaggatgtaaggctataagagggagaacaggagttttataaaaggtcgttggtcgatcggaacaacaaaccgtaccgagactttgcccgatacggtcttgtcgttgccctgcatataactcagtctatgtcatagcctatcatgtattcatcgttgataagcagataatagtagccgttgccacaattccggtactctttgctgaatcctgccgccatatcgccattttcgcgtggctcgcaccacagcgtaccgtcatagccgcaaaagtcgaagcgtccggtggaaaacttttcaccttgcttcagtgccgttctgaaacgagccatatcccaactgccgcaatacttctcgatggtggcaagtccgatacacttgccgtcgatgcgtgtgccggtcgtgatgcggttctcgtagagggatttatccaaatcggcattagcgattttgcgaagccaatcattcgtatgcgtggcaagccgggcaagtttctggtatttcaagaccagtttcttttctatgtccgctgcatcttcgggagaggatgacggatagtatatcttctcaatgcttgcccaatctgtgaagatgtacccgctttttcgttttttgggcgcaataatgccgatgacgttttcgttgcggttgataaacagccgtctgcgttttcctgcaatccttacatataaagaggcgggattctgctcgtttcggagataggcttctgccggatggatagttgttgtttccatatctatatgaattttgatttttgctgttcctatttgggtttacctgttcaaagttccgggattgtgccgttcttatatagaacaccgttccgataatgggacacgatgcccggcttaagtcccatttcctcaaaggctatatgcctgatatagtccttgtattctttgccaatgaaattctttccacaaaggttgttgaaaatcatagggacggaaaaaccgtcttcgctcgacaatatcactttgccgtcttgtctaatttcttctaccatacttgtttacttttaattggttgaacttttctgctgattttttctttttccctgctttcgtttgccgtgcaggtttgttttcagctttttgaggcagccagaggatgaagctgtggcatcataagccaaacccggatagaaaaccgaccgtgcaacagtctgttttcgtcatccgaatgcaatgcggcttggcgattatgcgcttcgtcctacattcgccgacgaaaagagtaaagaatgacctgccgataaacgagatgtgacaacaataaaacaggaaaatacgatttggtaaattgtcattgtacaatattgaacaaccactaaatatcggcacaattttaatttagtgccgatatttagtagatgatgacaaaaggttatttacatatagattgttttaaataaatacaaattttcggcactatttctgaatagtgccgaaaatttgctatatttgcaggcaaaaacaggatataatatgagtaataaaacaacgacatccatacttgaatacgctgaagtacaccgtgatttcagcatggatgacttgtttgcctatcttcacgaaaaggttggtataagcaagtcttccttgtcatggtatctgttcaagctcgtgaatgaaaatgcactggtcagaaccggacgcggaatgtatgctaaagtcatgaaacagccctttgttcctaaactcataggtgaagtaagagaaatttacgattcgttgctggtcaatttcccatttgcgaagttctgcgtctatcagggggatattatcgcacccttgcagcatcacctttcttccaaccgtgttgtctatgtggaaacagacagggattcggcagaaacggttttcaactttttgaaagacgggaaccgtgacgtctatctgcgaccggacaaagatatgatttaccgatatgtagatatggacagccgtgtcttttttgtgaaaaatttggtctcggaagctcctttgcagaaagtatcagatgtaccgatgcctacactggaaaagctgttggtggatatattgagggatgcggatttcttctacctacaaggcagtgaaagcgagcatatctttgaaaatgcctttaacctgtacgctgtcaatcgaaatcggctattcaggtatgccggcagacgtaaggcaaaagaagaaatattgtccatattagaaaatctgaacataaaatgataaagaaggagtgttttacggcagaatggatcgaacaggtttcatccgaattgcactataatgataaaaatctgatagagaaagtaatccgtgccctgtccctgcttgaaatgctggttaaagccgggtgtccactggtttttaagggaggaacggcacttatgctcatacttgggaaatctgctcatcgtctgtcaatcgacattgatgttatctgtccccctggaaccaacattgaagactatctgaaatcatttgccgatttcggcttcatcaatctggaacttgtggaacgcaagcaacgggatgatgcggatattcccaagagccattccaagtttttctatcagattgcctaccgaaatgacaccgatgcacaatcctatatcctgctggatgtactctacgaggacattcattatttccgtacccaacaaatagctatcgactgcccgttcatacggttggaaggaaaaccattgatggtaacagtcccgtccgcagaagatattttgggcgataaactgacggctttcgctcccaacacaactggaataccttattacaagaatggaaggtcctgttcgatggagatagccaaacagctttatgatgtggggcggctgtttgaaaatgtttcagacttgcagattaccaaagaagcgttccgtaagattgcggtggtcgaactttcataccggtctttcggaacggacatagggcaagttttcaatgacatccgccaaacggcactttgtatctccacacggggaaaagccggagaaggagacttcgacctgatacaagacggaatcatccgtgtcaaatcattcatgtacaatcagcgttatctgatagaccatgccattattgatgcagcaagggcggcttatttagccacgttaattgaaaagggaatcaatgaaatagaatcttattccaacaaccctgccgatataaaggatatggtcatccgaccttcgctgcccaacaaactgaataagctgagaagcaacctaccggaagcctactattattgggcaaaaacgagtgagttattggaagcatgaagttttacgaacatcgaatggaaaagataaaagccgtattcaactggagcgggggaaaagactccgcgcatgccctttggcgagctcgtcaatcggagctatacgacatcgttgccctgctcaccacaatcaatcgtgactcgcaacgctccaccatgcacggtatcccactccccttgcttcaggcacaagcagacagtatcggtattcccctgcatatcgtgaatctcacaccccaggggaaccttgaaaattacgcagaggccatgacttgcgcagccctacatttcaaggagcaaggagtaacccattttattttcggggatatttacttgcacgatgtccgtgcctaccgggagcgacaactcgctccactcggaatagaggttgtggagccgttatggggagtagtctcctcggaaatcgtcatgcagcaatacctcgcttccggactgaagacggtcatcgtgaccacgcaagccgatggcttgggaatggatgccatcggtcgcgaggtagatgccgactttattgcctctctccccaaggaaatggaccccaacggagaaaacggagaataccacacgttctgctacgacggaccgatattctcttcacccgtacttttccgactgggaactccctttagccaaagttatgacatccggcttgaggatggcacgattcaaacctatacttattgttttgcccatctttccgccgaaccataacacggattacatttgcaatcataaatcaacaatatggaaaacaaaggatatatacatgtctatactggcaacgggaaaggaaagacaacggccgcatttgggcttgccattcgagttttgtgtgccggaggaagcgtcttcatcggacaattcgtaaagaacatgaaatataatgaaaccaagatcgaacatctgtttaacaacgtccgcatccagcaattcggtcgggggtgctttattgaaaagaagccggcacaagaagatattgacgcagcttatgcgggattggaaagctgcaaacaaattctcgcttcgggagagtataatctggtcgtgctcgatgaactaaccattgccctgtattacgagttgctttctattgaggaggtattgacggcgatttctcgacgacattccgggacagagttggtaatcacgggacggtacgctccggcagaattgatcgacatagccgacttggtcacggagatgcgagaagtcaaacattattacacggaaggcgtcctctcccgcaacgggatagaccgttagagtccgatctccctactcggtcttggtttcacaatcattcaaataaaaaattacgataagttccaaaatgaaaagtcccctgttttaatcgaaaaccacatcacctaatgacactcttttcgattagcgtttggcgacataaacactcttacaacagtctgctcaaagctgaaatgcactcctgctgtgtagtcctgatgtaatcgaaaacgaccgacggatcgacactcttgccatttagcttgcaggttatgtgcaggtgttcgcctgtacttcgtccagtcgagccggttataccgacggcatcacggggacggactaccgtacccttggcggccagcacccgtgaaaggtggcaatagctgacggtgtaatttccgtgccgcagggtcacatacttgccggaagtcttgtcctgtcccactttgatgaccaccccctccatcatggccaatacctgctcgccccgtgcgtgcaggtcgataccgccgtgaaacttcctctttccggtaaacgggtctttccggtagccgtatggcgatgtaattctgatgcgctgcaatggataagacacgctgagataacggtcaatccacaacttcttactttcatcggcaggttttgtcgaagtctcctgtacaggagccatgctttcgggtgtcggctccggctttttcataccctcctgcaaggcttctaccttgtatctttctggtgtcttggcaatcgtgttgaactgcgcctgaacgggcatcgtgcagaatgaaatacccgatattgctatcagtaaaatttttctcattcggcaaagttataacgggagttttcatgtcggaaacaaacagccgtcatttcttgtattggtttgatattttgcgtctattagtacgatttgaattgaataatcgtactaatgaagataaaaacagcatattataaccatttatatagttgtatttttgtccgtcataataagatgtctctatctttgtatagtacaattttataatataaatatagtatgaaaaaagttcagattgaatttgatgaattacccttcccggcactggaacgattcggtctcacacgggagatgatcgaggatttgccgatgcgtgtgttggacgacatctgcaatggtcggcattctcccgtgcttcccgtgcgtgttacggacgagcatggcgggcaaatagagagccgtagccgctttgcctttatccgcatggacaacggtcaggtggatgtggtcttctatccggcactgaaatcctctccgttggaacggtatgacgaagcgcagcagaaacagttgctcgacggcaaggcgattgtcgccgacgtggaaatggcggacggccggaacagcaaggctttcgtgcagattgacaccgagacgaaacaggtgatgtatgtccccacgcccatcatcgcacgcaacctgaaagtgctggccgaggtcatgcgcctcggtgcagtggaggtaaacgggatgcagcacggcgagccgctgacggtcgtcgtggacggcgagtctgccacagtgggcatagaccttcatgccaagaccggcatccgcttctgttcgggcgacgcgcagcaatggcgcaaccagcccaagcgcgagtgggacaaatacaccttcgggtgctacggttgctgggtcatggacgatgacggcaaccttgactacgtttcggaagaggactacaccgaggagttgtggaacgaacagaagaagagcggcgagcgcaaccgtgcggcagccctccacaagtaaaaacaatcaatccgtagattatggcacaaaacgaatattatcccgaagaggtacttgtcgggaagatgcagagcggcgaatacggctggctcgattacgtcaatcatttctccgccgactggcaggaggaatacgcccgttactgcgaggaaaaggggcttgctgtcggcaacgaatccgctgccgagtttgtccgcttcaaggacgaacagctggaggcagcaatggaacgcggcgacgcataacgaaaacaatccgactatggcgatacgaacgaataccaatccccggcagatggacttgcagcccgaaatgcgcaatatgctgatgcgtaacggcctgcaagcccatgttgcgcttgatggttcagggtatcggctgattgtgcaggggcatgattctccgctgctggtctatccgataagcgaacgtcagatgttggcactcacggactggggaaccaatacggccaacaagaaagcctacaacgtgctcacgagcatcgtgggcaaagacttctacatgcccaagaacttcgtccatgcccgcaatgccaacgggcgtgtggctatggggctgcacggctaccgcatcggcatcggcgagtacggtcgcatgggacggatgggaatgcccccgccgttcctcggctggacgccacgcaaccagtggggcttgcacctgcgcagggtcggcggccaactgttctttccggggccgtccatcgtacccgaacgtcccgacgggcgcatgaagcccggcgagttgcaatcgggcggttacggattctattacaaggggcatcaacaggcgcaacccgtacagcaacgggacgttctgcaggacttgcaggcggtcatcacgccgatggtcagccgtccgcgcagcggggaaccggcacggtcgtacaaggagcttatagcctctccggtctatttttccaacgagaaattggcggagtgccttgcctcgcacggtcttgtcgtggatgcggaaaggcggacgctgactgtgcagtcggaaagcgtccaagccgatatggtctatgacctgacggaagaggaagtgaggacactggttgccacacccatcgaggaacaacccgtagaaaaacgtctggaactgctgaacggcattatcggggctgacttttccgacaaagtgacgatggaggctctcaacagcgatcaacgcatcgctatcggtctgcatcccgaagtacagcaggatttggaacaacgccaacggcaggagcaggaggctttcatgccggtggaaacctcgctgcaacagcaagaggaatccatacagggagagatcggtgcgtcagtggacgggcgtgacctccagtttctgaatgaaaacaagggatggtatcgggaagagaagcacggacgggaagtcgaagtgagccagatagccgttcaaccggcacagaccgaggggaaatacaggatgaccgccgttatcgacggtcaggctatcagccacgaaatcactcaacgggactacgacaagttccttgctgtggatgattatcaccggatgaagctcttttccaagattttcagcgaagtggacatgaaaacacgcccggaagcacaacgggcgctcggtacgaaaatctttgccgccctcaccgcaggtacggtagtcgcggcgggtgtcgcgcacggcatccaccatcactgccatgccccggagttctacggcgagcgtttcggcggtccgccacgcccgtacttcaagccgggtgtcgatacgccgagggatgtggccatccgttgtttcgaggcagagatgaaccgtgaaatcaatgatatgagaatggggaggtaaaccatgagagagggcgaactgacttatgacgattttctgcgcaggctgaacattcaggacgtgcttatcgatgcgggctatcacctgaaccggcgcgacggcctgcgctatccctcgtatgtccggttggacagcgaggggcggcgcatccgcaacgacaagttcattgtcacgcagcaagggaaatgctgtttcaaaccgcaacagcagaagtcgtataacatcatttcctttatcaaggagcatccgcatttttttgcggaataccgtgcaggcgtgtcttccgaccgactggtaaaccttgtctgcaaccggttgctgaaccaacccgtcgctgaccgggatacccggattatccagcctaaacgggaggtgaagccgtttgatatggcggattacgacattcaccagttcaatccgcaggatcgggcgacacaaaagaagttctatccgtttttcaagcatcgtggaatcgacctttacacgcaatacgccttccaccggaatttctgtctggcgacaaagcatcgtgaggacggcatgaaatacaccaacctcgcctttccgctgaccgttccgaaagatacggggcaggttgtcggtctggaagagcgaggccgcccccgcatggacggcagcggcagttataaaggaaaggcggaagggagcaattcgagccaagggctatggattgccagcccagcccaaacgcctcttgcgaatgccaggcatatctactggttcgagagtgcctacgatgcgatggcctattaccagcttcatcaggtaaacaacaaggatttgcggaaagcggtcttcgtatctaccggcggcaacccgacggtggaacagatgcggggtgttctcgcacttacacttcctgcccggcagcatatctgttttgataccgaccttgcgggaatcgagtttgccaagaatctgcaacaggagatgtaccgggttgtccgctccaccatcgagcagacgccggagcggaaggcatatctggattccgtcgctgacggcaagaatctcgatgaaggcgacattgaactgttgcccgacgctttgcggtcgagttacggcaaatatgaatccgcgtgggaagaagccatgtcgatgcggtcgagcggtttgtgccacccggacgacatacgggagcagacggatatcatgaacggtcattaccgggaatttcgggaagggctgcgggagttcctcggcttggacagggaaaacgatacctcttttgtccgtgaacagccgacctatcccagcaaggactggaacgaacagcttttggccgagctgaaacgggaagagacggtcgatgagacacaggcgagagaacagtcaccggaagaggaacaacaaacacactttcgccgatgatgaccgatgcacctacaggacatttccaaagtatcgtgctgcaaccgcacgccggacagttctttatcgacgagctgcccgcaatcgtgctgtgttgtgcggcatgggtgtacggaggtatggaggggctgcctctgacggctcttgccgtaccggtcgccaccttgctctctttggcattgctgtaccgtttcatctatctgcgccggacacgctaccatatcggttgcgagcagcttatcagccagcatggggtgctgtcccggaagacggactacatggagcaataccgcatcgtggactttgtggaacaccaaagcctcatgcaacagctttgcggattgaagacggtacgcatcttctcgacggacaggaatacaccccggcttgatttggtaggtattgaatacgacttcgatgcggtaacgcttatccgggaacgggtcgagtataacaaacgaaaaaagggaatatatgaaatcacgaatcattagtctggtcatttttgccgtctgcatgatgccacactgggcgaaagcacaaatcacggcatccaatccgttggaatggatggcgttggccgagggcaacgaagtcatcaatgaccagatagagaaacagataaacggccagacgaagacagcgatgctgcagaacagcatcgccgccgagttcaaccgcattcacaaatgggagaagcaatataacagctatctcaagacggcaagcggctatgcttcatcactgaaagcctgcacccacctctacaacgacggggtgagaatcttccttacgttggggaaattaggcaaggctatcaggaacaatccgcagggcatcgtcgcctccatgagcatgaacaacctgtatatcgagacggcaacggaactggtatcggtcttcacgctcctgaatgacgcggtagccaagggcggccatgagaatatgctcacgggagcggaacgcagcaagaccctgtgggcattgaacgacaaactttcggctttcagccggaagctgcacctgctctacctgagcatacggtactataccctcaatgatgtgtggaacaatgtgacggccgggatgctcgaccgcaacaacggggaggcggcacggatggccatgacccgttggcgcagggctgccgtcctcgcacgataaaaacggaactgacaatgaaacggacgatttggataggcatcttattgttgtgcatcggtattaacaagacatgggcgcagaacgaccccgtgcttgccgggatgattctgctctataccgacaaggcggaaaaggagctgaagaaccaggagaaggtcatgctgctgcagaccaccggacacctgtggacgaaagaggaagtgaaagccacgaccgacctgcaacgggagttcaacaactatctggactctttccggtcgatagtctgctacgcggcgcagatatacggtttctaccacgaaatatcgaagctgacggacaatatgggtgactttaccagacaggtgagccgtaacagtcccaatgcgctggccgtcgccctctccacgcaacggaaccggatttaccgggaactgatcatgaacagcgtggagattgtgaatgacatccgcatggcgtgcctttcggacaacaagatgacggagaaggagcgcatggaaatcgtcttcggcatccgtccgaagctcaagctgatgaacaagaagctgcaacggctgaccaaggcggtgaagtacacgacgatgggcgacatctggcgtgaaatcaacgaaggggcacgtccgacggccgacaagcgggacatcgtggaagctgccaagcgacgctggcggcagataggaaaaaatgtaagaccttaaaaacagataacgtatgggagtttgggattcaatattgaaatatggcggcaaggccatgaaaggtgtcgggacggctacggcggctaccggcaagaaaatgggcaatgcggctttgcacccctcgcaaaccttgcgtggtgcgggtcaggccgtcaagacggcgactgtcggcggcgcagtcggttatgtgggctgggagaagctgaccaccgacaaaagcgtggtgcgcatcgtgagcgatgcggtcatcggcgaactggcgacgaataccctcgcggagacggctgacggtgtgcgtgaactgacgggcaaggccggggaagccatcggctcggtcagcggtgcggtgaccggtatcgacaacaagctgaacggcgtgtcgaactttctgcgccaagcctctggtggcggtgtcatggatatgttcggcaactttttccgcaacctcggcagcggcaacgtgtcggggttgggcatcgccggactggtcgcggcggcgttcctcatattcggacgcttcggctggttaggaaaaatcgcgggggcgttcctcggcatgatgcttatcggtaataacgcgggtgtcctccgaacgcaggaaacgggaaacgtgcagcgtagccggacacctgaccttccggccgagaaacagacgcacagcggagggatgagaagataggaatatgaatcaaaatggaaacagcatgaaatatacagaagaaatgatcctgcaatccgagagcggctattgtatgcctttcgaggaacagcagggcaaggatgtggagctgtcgctcggctacggcgaacagaccgacccggcgacgggcgagaaattctttcatcacggcatcgacttcaacgtgcggtgctatacgctttccgcccttgccagcggcatcgtgtcgggcgtgggcaacgatagcggacacggcatctgccagaccatccgctacggggagtatgaggtgacctacggaaacctgtccaatgtgttcgcccaattcggccagcgtgtcaaggccgggcagacggtagccctgagcggcgacaagctgcatatcgccgtccgcttcaagggagaggaactgaacccgctggagttcctgacgatgctgtacgggaatattcaggcgatgcgtcaggctggcggacacgagactgactatttctccggtctggaactgaaaaccgattacgaacacgacaagagggagatagaggaactgatgctgcgcttcctgccgcattacatggaggatttgcggcatgggacatacaccttgccccgaaatacggagcagtcgctacgccacatcttcacggtgggcgcgatgaaggagtatttctacgagaatatgccgagcatggccaatccgctcggactgggacacaaagccctgccgctggcctgcaaggtacagaacctcctgattgcggatttcctgcattacctcgccctgcggcatgacgtgtacctctccacagcggacggcgacgtaaaaaaaaactccatgacgaagccctgacatataacggtgtcatcgacccgttggcggaactggacatcgacatccagagcttcgacataccgaggcttgtcacggtctatcccgaccgggcgggtgtgcgctggtggacgaaggcatggttcaacaaccgggaagagggcgagacatccgtcgaaatcgaacgggagcaggcgatacggttcatgcaggacaacatcgagaaggacgcatggctggaagagttctttccccggcagatggaggtttaccacaacgccatcgagcagacgaaagaacagttattgaaacagataaatatatagtacacaatatggatggaatcaaacatagccggcaattcgcggaaatggaacgcctcgtgagcgactatttccattgccaccttgcgcccgtcatgtcaaaaacgcaggcttacctcacgaagaaacagggcgaggaaatgagggaatattccacctccttgggcggcatactcagcgcgatggcgtctgcggcacaaccgatgggcgacccataccaggtactcaaggtcacgggcgaatggaactcgaagacaacggaggactatatcggaatgtgcaaggcggagattaccggctccaaggagatacagcaagacctcgcatacatggccgggcagtggcgtgataccgtcgtgcaggaaatcggacgcaagcgttacgatgaactgtcggaacaattaggcggtgaccttgcctatgcctatatggactaccgggtggaggaactgatgattgaccggctggtcaaggagcgtatgccgaaatcgtcagccgactacatcatccgcaaggccgccgaatcgagcctgctcggactctcgcagaccttgaaccgctcgccgcttgccgaggaaatcgaggcacggggcgaagcggcctaccgtccgaaaggatgggaaaaaggcgcgggtcgggtactgggcgcaacggcagataccgtgatgatgggcggcgtgggttcgtgggcaacactggcgaagtttgtcggggcagatgtggctatctcggcagtcgcctcccgtttcgagccgaaaaagcctgatacgctttctgtggaacagtgcatcagcaaaggggtgttcggcagcgaacggaacgtgtttgcggacttccgcaaagaggctgcaacggtacagaccggcgagagtccgcttatcatggcggccaacgagcgattgaaaaagaaaataccggtgatggactttaattttttgaagtggatgcagacgccgaagtttacccctttccaaatgcccgaactgcccggacaccctgaaaagaagaatgaacgtgccgaacggtacaaggatgtgccgctggtcgtcgctcccggacaggaagaagcctatctgaagcatttggagaaatataagaatgcaacggctgtaactgccaaaaaggagtcagcgcagccggagacggaacagagggaaaaagaagaaaaagaggaacggcaggcggttgttccccacaaggaagaaatgcaagaggaacaggccgtacagaacaacacgaacggttggaacggattgctcggtatgctggggctggacggtatgggagacgtcacgggcaacctcggatatgtcatggccatgctgcccgacatcctgctgggggcgtttaccggcaagacacaatcgttgcgcctgggggacaacctgctgccgatagcgagtatcgtggccggtctgttcgtgcgtaacccgttgctgaagatgctccttgtcggtctgggcggcgcgaacctgctgaacaaggctggacacgaggctttggggcgacccatgccgtccgctgccgaacagacggagaaacagtaccgccgttatcccgacgagccgctcaatccccgtatcgtgaacccggtactgcaaggcagcacgctcatcgccacgatagaccgtgttccctgtactatccagctcacgccgactgtcggagaggcttaccgtgcaggggcattgccgctgaacacgctggcgaacgccgtgcttgccaaaagcgaccagttgcgccatatcgcctcgcagaattacgacgacggacagcgggagacggtcgtgcgcacacggggcatccaataattccatgaacaataaaagcatgatgatatgaaagaaaagtcgcaaatcgaaaagaaagccgaagaaaagcagacggaactgctgtctgccgcactgggcggggcatcgaacgccggcggccattggctcaacgtatcgggcaagggatttccccggctctatccgcagggtgtctcggccagtccgttcaatgccctctttatggccttgcattcggacaataacggatgcaagaccaacctgttcacgctttacagtgaaaccaaggcacggggggctgcggtacgggagcatgagcagggcgtaccgttcctgttctataactggaacaagtatgtcaaccggaacaacccgaatgaaaccatcgaccgcaccgcctatctccagttggacgaagggcagaaggcacagttcaagggtgtccacaaccgggagatacgcactatcttcaacatcgaccagacgacgctgccctacgtggacaagccggcttacgaggatgcggtaagacaggacggcggtgttcaggagaaaggatataccgaagcggacaaccgcaagttgcgcacccggttcaacgatttcctgctgaaaatgcgggacaacctcgtccccgtgcgttcggacggctgcggattaccccattacgagacggacaaggatgcggtctatatgccgcgtcaaaaggactttgagcattaccacgactatgtgcaggaaaccttgcggcagattgtgagtgccacaggacaccaacagcggcttgcccgtgagggcatggtcatgaagaacggcgtggccccgtcggaggatgcggtaaaatatgaacggctgattgtggaactggcttcgggtatcaagatgttggaactgggactgcccgcgcgtttgtccgatgcaagcctgaagacggtggattactggtgtcgggagttcaaggaaaacccgtgtataatggacgctctcgaaagcgacgtgaacaatgcgcttgatgttatccgaaaagcggaacggggcgagaaaattgagtacgccaccctgcgaaacagacggcagaccacgaccatgcaggaacagatgcccaagcattactttgtggcgaatgaaatccgccagcacccggacaaggcggcgaaaagcatcgtcctcgtcatcgaccgggaggcgaaatcggcggatgtcattttgccggcaggagcttcgaccgaggcgaacaacgagattcccggcatgaacaaggggcgtatcgaacgggcattgcagaaagagggtatcgagcaggtgcgtttctataatactgacggtgcattgggttacagacccgatgacagctatttcaatgaaaaaatggtgacactggcccggttaaggaactacacgttggaaaagctctccacgctggacgtgtcggaagctgtcagacgggcgaatgaggtcgggttcgatgccgtgcagatgattcaggatgacaagaaccgttgggcactctatatcaagccggaaaacaaggaggggtacagcgtctatcccgacaaggaggatgtgaaccgttttttctccacgctcaagcaggcgatggacaacatcgacaaggtacggatggagctggcgcacaagtattatgcactggcggaggtcaaacccgacctgaaagtggatttgttcggcagcgatacgccggagattgacctgaaccgtattcagcgtgttgccatcttcaagaccaggcaggatggaatccagtgtgtggcaaccatcgacgggcaaaaattgcagccccggagcgtcacgccgcaacaatggcaacggatgtgggtggcggaagaccgtgacggctacaagcggcatttggcggctacgctgtttgccgatgtgctgcaaaagggacaatccgtcggggaacagaaagcggaagagcaggtacggcaacagaatgaggtggtggcggaaaatcggtcggaagagacgaatgatgaaaatatgtctccgaaacggcagttttgggacaacctcaaggaaaagcatcccgacgccctgtatctgattcgtgcaggagaagtctatcggctttataatgaggatgcggcaaagggagctgatatattggggattacgatgaagaaatatccggaacgtggattttcggctttcgcagagttcccaaggacgcaactggacagctatctgcccaaacttgtccgtgctggtgagcgtgtcgccatcagtgagatagagctacaggataaacggcaggacgagcaggaaacacataggggtattcatagataaggagtgacgattatgaccaagaatcaggaatatgcactgcaatacgcagattatgcgatggcacagatgcgaaggtatggcatcccggcttccgtcacattggcgcaaggcatactggaaagcagcaacggacagagccgtctggcaaggaacgagaacaaccatttcggcatcaaggcaacttcctcgtggattgccgaaggcggcaaatacggaatctacaccgatgataagccgaatgaaaagttctgcagctatgacagcgtgggtgattcatacgagcatcattcccgctttttgaaggagaacagccgctatgccggttgcttcaaactctccccggacgattacaagggctgggcacaaagcattgagaaagccggttacgccacaggcggcaagtatgccgagaacctgcagaaaatcattgagcagaacggcttgcagaagtatgacagacaggtgatgcaggagatgacggcacaaggccggcagttcggggtggaacacaatccgctccagacttccgagggtgcggaacatggaacggggtattcgtttccggtggaacgggaggaatttctattcgtcacctcgccgttcggaacacggcaagacccgatggacggcacaaagcagcagatgcacaagggggtggatatccgttgtaaaggcgacgcggtactggctacggaaaacggcggcaaggtcgtggcggtaaaccaaaacaggaacacgcccggcggcaggtcgctgacggtggaatatgcccggacggacggcagcaaggtacaatgtacctatatgcacctcaaggagatttccgtcaaggtcggcgatacggtacaggccggcggacggctcggcacatcgggcaatacggggacacggacgaccggggagcatctgcatttcggtgtgaagaatatctatgccgacggaacgatgcgggacatagaccctgcggcgtatctggctgaaatcgcacagaaaggacatatcaagctgcaaatgctgcacaacggtaatgacctgctcgccaaatacaaggtggcggaagagaccgtgcctgaaaagaacctttcgcctgacggatggatgaagaagctcctttcgtcggaggacagcggtgtgggaatgtcgggttgcaacgacccgattgtggagatggcgatgaccgctttcgcctccctgatgctgctggccacacagattgacaaccggaacgaagaggaacagaaggcggccatatctgctatgatggatcttcgtgccattgacctgaagccgttgttgccgaatatgaagaactgcgacctgactatcggcgagaacggcaaggctgtcttgaatgcggacaatggcgaactgcgtgtctcacgggagctgaccgcttccgagctgagccggttgtctgccacgttgaacaacggcacactcacggaagaggccaagcggatgcgtgtaaccggtatgctgaatacggttatcctgtcggaagcggcctctcagaatttcgagcaagggatgtcccggcaacagggacagacggaaaacctgcgaagataaaagcatggcgatatgataaaatgcgtgatgatacagctatgcaagtgtctggcgggagtttccatccttgctttgcacgtccggttctgctacctgctgttggggtggatcgggacgttcgttgtcgtgggcgtgcaattagtcatcgccggatggattgtctgggcgatgatacgcgcacctgactgactgtaccctccaacagttcaacatcaatcaacccatgtatcacttgtcggatgatccatgtatcattaaagacagaaaaacaaatgattaaatgtaatgttacggtatgcggcgttatcggccgcgatgcgtcggttcgcaagaacaaagaagataaagagtttctggcatttccactccgggtacagattccggcgactggtggccagcacactatcgaggtggatgtccgcagggagggcaaccaggaagaagccgccggttatcggaacggctcccgtgtggaagtgaggggtacgatgtatctcaaacgtcggggcgacaagctctatttcaacctgttcgccgatgaaatctgccatgccgctacggataatgcggattccgtcaagggcgaactggtgtttcgtggcaagaccggccagaacatcgaagaaaaaagggataagaaagaccagccgtacacggtattctcggcgttcagcgcggagaaggtcgatgacggcttcgagtaccagtgggtgcgcttcttctgtttcggcaaggagcgcgatgagtggctgcagccgggtgtaaaggtggatgccagaggtgaaatgaacctgtcggcgcacaacgggaaggtcaacctctcctgcaaggtggaggaactggcgcaatatgtggcggattcgtctaactataatcagtaagggttatggccggttacagaaaaagaaatgccgacgggccgaacagcgaggacaaggcactcgacctgttcgccgaaatgatgatcttatgttgacctcaacataaaatcatttatgtctgacatagaattatgttgggcattagtctaaacaattaataatcaatcgttctttgacattttgcacaacataattctatctttggaggaattagaggctatctaagaatgtaattaactccttatcctcagaccattttcgtgatggtgtatcggaaacggactgctcacattttttgagaacttctaatttcctttccatgctaatttcggcgtagatgtttgttgtatcaatcgagctatgtcccatccaatttctaaccatatcaatatccgctccagaattaagtagatgagtggcggttgtatggcgtataacgtgaggagatgggcgtttattagcaagagagggatgatttaagattacatcttgtgagtatttctttatcatttcataaatacagaatcggctcataggctgattgtatcggttaaggaaaaggtaatcgtcaggcaacttgttgtctataaattgtttgagtaaatcccagaaatcctcccataaaggacatattctctctttacgccccttgccatgtaatgtcaccattggcattccacgttttgaaggcatcgcaacatccttcactttaacaccaataacttcagacactcgggcgccagtattatacatgaataggataatgacatgatctcgacttcttatcccttgatatttgcatgttttcaatggtgcatcagccaaggcttcgatctcagatttgtccatataggttatcatgcgtttttccgttttctttgaagggataagagtgacatggtgacaccaatctatatgttcaggagatttccacgccagaaactttgcgaaagcctttattgcagctaaacgattgtttcttgaagatacggaaacttttctctcaatttccagataatcaagaaatttcgtaataacgtcagtcgtaatatccgagattttgagattgtctattgcaatacttattaatgtagagacatacgataccaacatacggaatgtatcacgataactcatctgagtgttacgactaaggtttcgagtgacaattaagtactctatgaggaatggtcttagccaatagccaagatattctgtttcagtaattcttctgttcttcattgttcgtgtttttataagcataaaacaatttgtttgcttcctgcaacaaagttggcgtctttgttagatagacggaagtgaaggacacgttaagatgtcccaaatagatagacaacttcggcagtaaatcctgtacgttctttcctgatttataccagttagtaaggacgtcgaccgcaaaagtatggcgaagatcatgtattctaggctgatgacgtcctctatcagggaaataaagacctgcattcttacgaatggtcgcaaatatctgatgtaaagatacaaaattaacaggtttccccttctgattaatgaaaacatatgcatcctctaccattggggacatttgagtacttcgccattgtaatatctcttgcatcaattttgatatttgttcgttgaaagtaaccaagcgagacttgtagaacttactacaatgtatatgcacgtacatattatccatatcaatatcctttatttttaaggataaggtctcacttattctgagtccaagcatatacgtgatcatcaagatatatcgtatacatattggctcattaacaaatgatctatatttgcgatatgtaagcgcacaatcaaacagtctcttcagttcgtcatccgtatatatgtaagcgggataatactctggagctttaggcagaaaaacgggaataggtatgttttgaatgagtcctctagaaaaagcccactcaaaaagttttttcagaatgcagtgctgagaatgccaatatctggtgatgacatttccttttctgtaaaggaaggcattacaatcgctttccgttattgaagttaattctgttgtttctccaatgaacttagcaaataatctcaaagagtaagttgtactctgatccttacgaccaatagacctacgaaacttgataaatgactcaacagtttcttttatactcatagaagctccccccagttaatatttgaaacatctctaagtgaattgagatccacttttgcatatattcttgtcgcttccatacttttgtgacccagtaaatcaccgacatcctttaaggtttgtccttcgtttatcaagaaagttgcatggctatggcgtaaacaatggggacctttgtgcctaacgtccatttcgctggatttcaaatacctatatacgacggaagctatggctgtacaagatataggacgtatcggggctggtgtacaaaagaacaagctatcgcttcctatgtcatttggccttccctgttttaggtaagcgataatagcttctcctacattatgtagaagtggtaacacttgtggtcgacaattcttcgcacgcttaatatagacttgttctttacgccaatcgatgtcgctaatcttcaagtttgccacctcactacaacgtaaaccgtacatagcaagtaacataaaaatagcatagtcgcgcgatgcggatttaccagtttgttctttgactgtttgtaacagtttttgaactttattccacggcaagaaagaagggagattttcttcactatatactttgggagtgattaacgccttatctaggtcggtaatacaccaccccttttcgactgcataacgaagatatacacgaatacaacacaggtactctttcagcgtgttacgttgaaccttgttaatcgtgtagtattcaatgtatttatctatatcttccaatgttaaagggtgttcctggttctccttttctattatcttgtaaaagtaggtgagtatatatctccttcccttaatataggcatgagaatatctcctgtatgccaagtgattaaggtattcatttatgcgtatatctgatattgaaggagatcctgattctggtagcatatgtagctctttaagccacatatttgcaaaatagatgaagaaactataattagacttggtgcctttcttcttgtgagaacctttgtcttccaggttttgccatttttttgctgcatttgagatttcctcattggtaacaatacggaagttctttaaatcaagatactctattagatgaagttgatactgtgcataaagctgaagtgtctgtcttttaaaaccttttgatttgcaatccatcaagaaagacattctctctttataaaagggagcggcaatcagtctgactctgtgccatttgcgctctgcgagataattgatgatgtcgtcttggtaacgagaatctaaaagacctacgtatagtaagaattcaacagccatctcaatgaatttgattcttgaggaagggcaatcatgacgtttccgagaatgataatgatcaggaatgggtgaagaccattgacgtgcagcttcaacgacatcatcaagtgacacaattctcttttcgccatcatgaagatcgaaatattggataaacttgagcgaatacccagcccaccccaatagtgttagccgggacaatccttccttacttttcatagttagaaagtattctcgctcctttaataatggtgcagccaaatgttttttaaggaatgacttgcggataatgatttgttctaacatgctcttataattatatgagtaatactatataatataaacgagcatccaaaattatgttgtacaaaattcgataagaactctaattatcaaataaatatgaaagaaactgacataaacaaatgggcaacattaatgatcgagaaaatcgagggcatccacaaggactggaaaaagccttggtttacggagggtgcgttgcagtggccccgcaaccttcacgggcgcgagtacaacgggatgaatgcctttatgttgctccttcactgtgagaaagaggggtacaagattccccgtttctgtacgttcgactgtgtgcagcggctcaacaagcccggcaaggatggggaggaactgccccgtgtctccgtgcttcgtggcgagaagtcctttccggtcatgctcaccacgttcacttgcatccataaggaaaccagggagaaaatcaagtatgacgattacaagaagttgtccgatgaagaaaagaatcagtacaatgtctatccgaagatgcaggtgttccgtgtcttcaatgtcgcgcagaccaatttgcaggaagcgaggccggagctatgggaaaagctggagcgggaaaactcgcgtccggccattgagaacggcgagcatttcagtttcgcacctgtcgatacgatgatacgggacaatctgtggatttgcccgattacaccgcaatatcaggataaagcctactattcaatctcgaacaatgaaatcatcgtgccggaaaaggaacaattcaaatcgggagagtcgttctatgggacgctgttccacgaaatgacacactcgaccggtgcggagggtgttctcgaccgattcaagccgactgccttcggttccccggagtatgcccgtgaggaactggtggcggaattgggcagcgcattggtcgcacagcgttatggcatgaccaagcatatcaaggaggacagttgcgcgtatctcaaaagttggcttgatgagctgaaggaatcgccgcagttcattaagacgacgcttctggatgtaaagaaagcgacttcaatgattacccaaagggtggataagatagcgcaggagttggaacagaatgtcggtgagaagcaggagaatggagtggcggcaaaggagaagatttattattcctctgtcgtttatctccagtcctcggatgatacgaggcagcttgacgaacttagggacaaaggtgattatgaggggttgcttacgcttgccaaggagtattatgacggcaacggtatcaacgagaaatatacttatccgtcggctacgaacaacaagggtgacagccttattgtcgatgacgggaattttgctgtcgtgtacaacgggagtgtcgggggaacctacgaggtgatgttgaaattcacggagcaggaaatccgagaccatatccggcgttacggtgtcgatattgccggagagacgataaaagaggttgccagggagatggcggtggaacagttctccgctttggcgcatcaaaagattccgaccttcgagatgccgaacggcgacgtgctgtatgtcaaatataacaaggaatccgatacgcttgatgtcgggcagcccaccaatgccgggctggtcgcgcagcatcgtttcccttacgaccacaatatcgggttggatgctaacttgcaagccgtgaacgagaagctgaacgaactggaagagtatcgggcagaactacaagaggctgaatacggtggcggtatgcgccggtaaggaaaacaagaaaagatgcggaaccggttggctccgcatcttttcttgttttcgtttttttattctttcagtaaatcatccatcatggactgcaaatttgccatgtcacaatattggttatatcctcctctgtagtcttttgcgtgttgggctgtccgtatcagaaacgaatcaagttcaactcttacgccgccgcccattcgggccaacgtggaagagtgcctgatgtaaacgaacttgccgttgcgctcgatgaaacatgaggtatcataatgtccttttaagttggatgccacctgtgcaccgaccgccgttgcatatttggaaatctcacgtaccaatgctgtctggaaactgcgatactcttttgaaacatagcctcctgcatctgcaaggatagcgttctgccatttggtataaaaattctgtgccatattgatatttattattattcgttccacaaataacttttccacttctcgccgtcaatggtcagtttgcccatttcccaatcgtattccacttccggtatattggtataagggaaattaacggtatagcctatctgtccgtatgagcaatgcagaggggtaacacaaatctcccacccgaagtaaagttgtggcgtgcagtatttttgccagttgaaacgacctgcggcaatattgccgcaaagtcgtttgagtatgccggttgttgtcattccgcacctcctttgcttaggatagtaagctgtccgggacggtctggaaaccaataggcatcactgtcgatatatacgcatctaccgccattccacggctttctgaaagctaatacttctttggggccaaacaccaccccatagtcgtttgtaaacgccaccatatcgcctacagccaaaccgctgtctgtttccatgacttcggacaaccggctgaaaaactccatgccctcggcttcacgctctttcttccagcgcagaaattcctctttgtggcttctcgatgagccaatgggtgatagctccgatgccaaaacttcaatctcagaagaacctgttgcgactaaaataatactgtcgctatccactttttcgggagttgagataattcgacattctacatcgttatcggcagtgtgccgataaaggaggttgccttgcttgatgaaatcgtacttgttcattgtcttttgatttagtgattttttttatttcccttttcttgaagtcttctgacttcgcccaaagaggttgttttcatgtgcgttccaaacgggggatacaagaacgacggacaaggaacctgcgatgaaattttatgaaataccgttatctccgattacggaaagttgtcgtcaaattttatttcaggtagcgatagcggtacttgaaccatgttcgtccaccgtacctttgcacacgaaaacagatctgcggcgtatgtcggggctgtgaagggattatacccttaaaacaggaatataccggcagggaagccgatggcggaaactcggcagagtatgttataaaagtaatcggggagcctgtgcaaaaaagagagcaaccacccgcttttgaggcgggtgattgccaatgtttcggacaatcatcagaagtgataatcaacaactcctccgatgtagagtatcgttcccggttcaagcctacaaacaaactccataaacgcaaaggactgttcggcaaaagactggcagccgtcgccatccaaatagaaatgataggcgacatccaacggattttctactgcctgtttgagataataggtcgaaccccattccaacatattatctaccgtaagagcatccgctctctttttgatattggcgacatactcctctttccattgctctattccaccattatagcgcatggtgtcatcggatataagctcgaacattccgttgggtaaggcatgattgaccaaattggcaatatcctctttacggttttcctcgtctatttctgaacaatagtcatagaagctcccgtctccttgctggagtgtgtcctcattcagatagttttctttgtctatcggctccgttgaaatttgaaaaatcctgctgtgcataattgtaaattttagattgtcaaacattttcttgtttcccttttcttgaagctcttcggcttctcgtcggggaatgatttttatgcaggactgacagcggaaaaaggacggataaggcaagtaaacagtgtacgggatggaacggaatacccaaccgccgagtgcaagggcaaaacccggctcgaccggctttgttctgcaacgagacgggggctaaaagcccatcttcgatttgcggaaggctgccgtgaagaatatccgggaaccgttagcgaaagcggtacttgacgaccggacgcacgctgtacctttgcatagaaaacctctccgaagagaattgctgacgtgagatgagaaaaagccataattgagaaatgttattattcataaaggggaaggactattcatagttgttataaatgtttagttggcatgaaaatacaattcgcactataaaataatcttttcttgaaataaaaattagggaaaaagaaacgagattaaaaaataaccattaactttgcaccagtcaagtttccaatcgaagcgtcgaatggaattaaaagggaatcccggtgaaaatccggagctgtactcgcagctgtaagtcctattaaagtttatcgcactctttgccactggtgaaagctgggaaggcgcgataagcgggatgagccagaagacctgcttgatgagatatgatttagtgaccacgggataattggcattagattaaaatgaacagaggctcgtccaaagacacctaatattctttttgataaccgatttctcattcgttgcaaatctatcgcaaggaaaacgaatgtgtaattaaacttttttgtttaacttttaataattgagttatgaaaaagaatcttaaattcttggcaatggctgttgtagcaatggccgccgcagtgttcacaggatgttcgtccgatgatgacttccttgctccgtatgaggagagtgcgattcaaacccgcgcgataagttctaccaatgcgcttatcaattttgataacgtaccttccagcgtaatggcttctgaccagtatggaaacaatctctattctgccacggccaacggcaagcaggtaacgaccggctacatcactcaaatcgggcaaaccggtacgtacattcagttcccgattaactatttggaacaagaatgggtaagcggacagccttgggaatatgagttttggaatggtggttttgccatctctaatttccataatctgacacagggtgattatgagaatcaatgtagcgtttatgataagaatggcggtcatagcggtaaaaattttgccgttgctttcggttatagcgattcatacaatgatgcgggagcaacctatgacaagtgcgccaagatttacttgaccaatgcaaccggatataaagtcgaaattccaaagaagccagttaagggtacaccgaaatatggcaaattcaacagtgtatgggtctgcaatacaacttatacctacttggtcatgaaggatggcaactcgtttacacaaggctctttgtcggcacaaaaaggatggtttaaggtggtatttgttgcgttggatgcgacgggtaaacctacaggtaaggaagtagaatactatttggcaaacttcgattccagtaaggatgcagaatcaggcttggccaatcaaatccgtactggttggagccaagtggacttaagcggtttaggtgacagcgtatgtactgtagctatcaattttaaaggaagcgattcaagcgcatacggattgaacactcctgcttacgttgccatagacgatattgatgtaaccgtaaacgaataacatgaatttggggcaaatgctttttaacgacaaatgctaagtatttgcccctttttattatatcccaatggagattgaaattaaatactttcttcaagggaatttcagcgttaaaattataaatataatgaagaagtatttgcttttattctccttgacgatatttctatttgcatgcaacaaagacgaagaaatatcgcaggacgtgaccgtgcctcctgtcattgaattggacagcgaagacggaatctatgttgtaaagataggaaaagaggtcgttattgagccgacctatcagaatgtcgattacgccgtttattcatggaaatgcaacggtcgtatcatttccgatgagcctcaattgaaatacattttcaacgaatgcggttcgtattacgttaccctgcgtgtggatacgagggatgccagcacagaggaagaaattcgtgtggatgtcaatgaattggctccgcccgtcatttcattggtaaccccctctatagggcttaaagttgtcgcaggacgtgaatatatccttactcccgacattcaaaatgcagaaggagctacttatttgtggactcttaacgggaacgaagtcggaactgaaaatacttatacattcaagcaagatgagttgggaacttatgaactgactttaactgtagcgaatgaagacggacaatcagagaagacagtttctattgaggttgtcgataaacttccaattgaaatcgtagttccgtcatctttatatttcaccgaggataataccaaatacgtagaattaggacgtactttgtttgtccgcccctttgtatcaataagtgccgagccttcttatcaatggattttggacgggcaaccgattgagggagccaattccttggtttacggtttcaaaccctctaaaaccggagaacacacgcttacttttaccgtgaaatacgataatcaaataacaaaagcaaccctcactcgtaatattgctgtttccggtgtcgatgaagtcagtgtcaatattccggtgaaatgttgtgaagcggccggaaaaagaccttttgctgccggaaattccatttacagcaataaagtatatgaatttgttccggctccgggacaattcgtaaacgaaacgaatacagcaggtttcaatggggaaagcacgcacgaagcagcctgtgcttacgcacaaaaacgtcttgataatgaacaatatgtttctcttggaggttggggaggatatatcgtagtaggattcgaccacagtatcgaaaacaaaggcggttatgatttttccatcaaaggaaatgcctttgattcgtcaaatgaaccgggcattgtatgggtaatgcaagatgtcaatggagacggcttgcccaacgatgaatggtatgaactgaagggttctgaatatggaaaacccgaaaccattcaggactatgccgtaacttatttccgtcccggtcccaacatggatactcaatggcaggacaacaagggaaataaaggagcgattgaccgtctcggcaactatcacccgcaagagttttattatcctttgtggattgaagcggattcctatacgttatacggcacatgcctgaaagcacgtaccgaacaaagcccgtcgacaggcatgtggtccaataatccgttcggatggggatatgccgataatattggtgatgatatgcccaataaagacaatcctaacgcgggagcacttggaaactattttaagatttccgatgcagtcaatatcgacggtacacctgcaaacctttcccatatcgactttatcaaggtgcagaccggagtcaatgtaaaagccggatggttaggggaaaattccacggaagttttcaagttctgtgatgaaaacaacaataacgacaaataaaattcattatgaacaaaatatatcatttcatcctattctgtttcgctacgctctgccttgctgcatgtagtgatgacgaccctgaagtaagcggaatagacggcaaggatcacttcatctccgagtttgctctaactgtagatggcattacctatcaagccatgatagtcggggacaagattacagttgagataccttataataccagtctgaaaggggctaccgtagagtatgccctttgcgagggagcctctattaacccgaatccatcaaccatagaggattgggaaaatgaatggaaattcgtagtcacctccagaatgcaggagagcaaagtatattcctatacttatcaatatgcagacatcgaacagagcggcagcgtggtacttgccacgcaatccgaggtggataattttgccaagacaggaataaacaaaatcgaaggcagcctgaccatcggaacggcagacggagaagaaatcaccaatctggacggacttgccaacctgaaacaaatcagtaactctcttgttatcaatccgtcttacaaaggagcggatttgacggggttggataatctggaacaactcggaagtttcaaattaggatcgacaacttctaccagtaaaaacataacgctcaaaacggttaatctgccctctttgcttggagtgaccggcgattttgtcgttaacagttctgtcattgaaaaaatatccatacccaaagtcgagttcattggtgaggatatgtatataacctccgatgctttgcttgatttggatgcaaatgccgttgaatctgtcggagcttccttaattgtcaaaggttcggtagcacaaaaagaatcagcgacaaccgaagccattgttttctcagcgctcaaacgggtcgggaatgaacttacagtccaatattttcccaaactgcaaggaatttatctaccggcattggaaagtgtggccggtactgcctcattctccgatatgtcctccatcggaagtcttgcaatgaccgaattacattcggttggaggactgactataaaaaattgcaaagagatttccattgttgaacttcccggtcttatttcctgcggagagaccagtgtggatgcgaataaagtcaataagtttaatatatcttctttgaaagatgtactcggtgatatgactttaagtaatctgctcatagaagaactggatttgtcccagataaattttaacgggaatacacttaccctacaatgtaagcaactaaataaaatcgtaggttcggaaacatttaacggtagccttcttctgcttcctaaaaattgtcgattgaccgaattgactcttgagggaatctcaaatatagagggcgacttccaatgcaaagattatttttatgtaaaagaatttgttatgccatttattcgtgtggcaggaaatatgactattgcattgaattcgggaagtgttgatacgggtgcggaaattgaatttcctaaattgcaggaaataggaggtactttaacattagaaaataatacgaatgcaaataatattaccttcccgtcattgaaaaaaattctcggttcatgttcggttacgactgattttcttaagaatgatattgagtttaccagtttggaaagcattgggacggatggagcaaatacacaaattgagtttaagattgatgttactaatattttatgtcccaaattaaaaacgataaacggactgtttaatattgtaacatctactgttgtatggggtatgacggctgatgaggtgtcttatcctaccgttgaatcaatatccgaaaatctttcaataacatgcccgtattctgattttggttctaatggtattttgtccattgatttttcaggtctcaaatcagtaaaagggattagtataagcgggcaaggagatgttagcgatttcagttctttcaaatacctgtttgaaaacaatgttctaacaggagaatctcaatggtctgtcagagaatgtgcttataaccccacataccaagatatgaaagacgggaagtacaagcctgccgaatagataaccaaacaataagttttctgccaatcctcggtatgcttgccgtaaggtaagactaccggggattaactataaaaataacggtatgacctatcaccaattgaaatatctgctatggagcgtagttgtcggagtgacactatccttgacatcctgcatgaagtgggactacggcgatgccgtagaagacttcaatgccacgggagccggactgttcatcaccaacgagggcaacttccagtacggcaatgctaccttgtcctattacgaccctgcgaccaaacaggtacagaacgaaatcttcttccgtgccaacggcatgaaactcggcgacgtggcgcagtcgatgaccatctacgacaacaagggctgggtcgtggtgaacaactcccacgtgattttcgccatcgacctgaacaccttcaaggaggtgggacgcatcgagaatctgacctccccgcgctatatccatttcctgagcgacgagaaagcctatgtcacccaactgtgggacaaccgcatcttcattataaatccgcgaacgtatgaaatcaccgggcatatccaagtgccggacatgacgatggaaagcggctcgacggagcagatggtgcagtacggcaaatacgtctattgcaactgttggagttaccagaaccgtatcatcaaaatcgacaccgagaccgaccaagttgtcgatgaactgaaaatcggcatccagcccacatcgttggtcatggacaagtataacaagatgtggacgattaccgacggcggctacgagggcagcccctacggttacgaagccccctcgctctaccgcatcgacgccgagaccttcactgtggagaagcagttcaagttcaagttgggcgactggccctcggaggtgcagctcaacggcgacagggacaaactctactggattaacaaagacatctggtgcatggacgtgacggcgagccgtgtgccggtgcgcccgttcctcgaatacagcggtacgatttattacggcttgacggtgaaccccgctaacggggaggtgtacatcgctgatgccatcgactaccagcagcagggcatgatataccgctactcacttgacggcgaactgattgatgaattttatgttgggattatccctggtgcattttgttggaaataagaaaggaggcaatatgaaaagactatatctgttattcgctttggcggcatgtctccccacggcactttttgcgcagcagacggaaagcaaaaagcggtcggactggcatcttaccataccggaagtcacggtcatcggacatcggccgatgaaagaaatcggtgtgcagaagacgaagttcgattcactcgcactgaaagagaacatcgccctctcgatggccgacatcctgacgttcaactcgtccgtattcgtcaagagctacggacgcgccacgctctcgaccgtcgcgttccgaggaacgtcgccttcacacacgcaagtgacatggaacggcatgcgcatcaacaaccccatgctcggcatgacagacttctccaccattccgtcctacttcatagacaacgcatcgctgctgcacggtacttcatcggtgaacgagactggcggtggactgggcggtctggttaagcttggtaccacccccaccgttgccgaagggttcaacgcccagtacgtgcagggcatcggatcgttccggacattcgacgagttcgctcgcttcacctacggaagcaagcggtggcacggctctacccgtgcggtctattcttcctcgcctaacgattacaagtacaccaaccacgacaagaagataaacatctacgacgaggacaagaacatcatcgggcagtatcaccctaaagagcgcaaccgctccggggcgttcaaggacctgcacctgcttcaagaggtctattacaacacccgcaaaggcgacaaattaggcctgaacgcatggtatatcaactccaaccgggaacttccgatgttgacgaccgactacggagatgcaaccgacttcgagaaccgccagcgggaacagactttccgcagtgtcctttcgtgggatcatatcaaaagcaactggaaactcggcgtgaaaggcggttacatacacacatggatggcctacgactacaagcgtgaggtcgcacctgataactgggcgtcgatgacccgttcgcgcagcaaggtaaatacgttctacgggcaggctgaaggtgaatacagtccgacaaaacgttggtttttcaccgctaacgtatcggctcaccagcatttggtacgcagtgaggacaagaatatcatcttgcaggacggaggcaaagccatcgtgggctatgacaaaggacgcgtggaactttccggctccgtatctgccaagtggcaaccgatagaccggcttggcatgtcggttgtgttgcgagaagaaatgtacggttccgagtgggctccacttataccggctttttttattgacggcatcatttctccgaaagggaatgtgatgctcaaagcttctgtttcacgcaattaccgtttcccgacgctgaatgacctctatttcctgcccggtggcaatcccaatctgagaaacgagcatggtttcagctacgatgcaggtgtaagtttcgaggtcggcaaagaaaatgcctataagttgaacggcggcgtgaactggttcgattcctacatcgacgactggattatctggctgcccaccaccaaaggattcttttcgccccgcaacgtgaagaaggtacacgcctacggcatcgaggtcaaagcgaacctggccgtgcagccggcaaaggattggctcatcgacctgaacggctcttattcgtggacaccctctatcaacgagggcgagaaaatgtcacctgctgaccagtcggtgggcaaacagctgccctacgtgccggagcattccgcctcgctgacaggacggttgtcgtggcggtcgtgggcgttcctttacaagtgggcgttctactcggagcgtttcaccatgtcaagcaacgactacacgctgacaggacacctgcccgaatatttcatgagcaacgtctccttggagaaaaacctgtttttcaaaccggtggacgttcaattgaaatttgcagtcaataatctcttcaacgaggactacctttcggtgctctcgcgccccatgcccggcatcaacttcgaactgttcatcggcatcaccccgaagttcggaaaaaataagaagaaatccgtaaatacaaatttgtaacaatatgaaagcattgaaaaatctgagcctgatattgctgcttgtactgacattcacaggctgccatgataagagttccaaacttgccgatttcaaccgaacggcctatacacctgaatacgcttcggggtttaacataaaaggtgctgacagcagaaagagcgtattggttaccgtcacgaacccttggcagggagccgacagcattaccacgtgcctgttcatcgcccgtgacggcgaagccgctcccgaagatttcaccggtcaggtactcaacgggaatgccggacgcatcgtctgcatgtcttcgacccatatcgccatgcttgacgcgatcggcgaaacggggcgcgtggtcggggtatcgggtatcgactacatttccaatcccgatattcaggcacgacgcgacagcgtcggcgacgtgggctatgaggggaacattaactatgagctgctgctctcgctcgatcccgacctcgtactgctttacggcgtgaacggggccagctcgatggaagggaaactgaaagaactgaacatcccgttcatgtatgtcggcgattacctggaagagtcgccgctgggcaaagccgaatggctggtggcattggcggaggttgcaggaaaacggacagagggagagaaagtgtttgccgagattccggttcgctataacgctttgaaaaagcgagtaaccgatgcagccatcgatgccccttcagtgatgctcaacacgccttacggcgacaattggttcatgccctcgaccgaaagctatgtcgcccggttgatcaaagatgccggaggcgattacatctacaagaagaacacgggaaacgcttccgcgcccatcgacctcgaagaggcgtatctgctggcctcgcaagccgatatgtggctgcatgtgggtatggcgaacacgctcgacgaactgcgagccgcctgcccgaagttcaccgacacccggtgcttccgcaacggatacgtctataacaacaacgcccgcacgaatgccgccggcggcaacgactactacgagtcggccgtggtgaatcccgacctcgtgctacgagacctcgtaaagatattccaccccgaactggtcgcagaagatttcgtctattacaagcaattgaaataaatgcgctcccgttccgtcctattatttaccgcactggctgccctcaccctcttcctgtttctgctggatttggcggtgggggctgtcgccgtgccgctcggcgatgtttgggcggccctgacgggtggcgattgtccgcgagcgacggcgaaaatcatactgaatatccgactgattaaggcggtggtcgcgttgctggccggagccgccctgtcggtcagcggtcttcagatgcagaccctcttccgcaatccccttgccgggccttacgtgctcggtatcagttcgggcgcgagcctcggcgtggcactcgtcgtacttgccggtgtcggctcgtcgataggcatcgctggggcggcatggctcggagcggcaatcgtgttggttgtcatcgccgccgtcggacaccgcatcaaagatatcatggtaattctgattctcggcatgatgttctcgtcgggaatcggtgcggtcgtccaaataatgcagtatgttcccaacgaagaatacttgaaaatgttcgtcatctgcacgatgggatcgctcggcgacgtgaccttcaatcagcttgcggtactcatcccgtcgattatcgccggattgttgttggccgtaatcaccatcaagccgctcaacctgctgctgttcggcgaggagtatgccgtgacgatggggctgaacgtccgtcgctcacgcggactgctgttcctctccacgacgttgctggccggcacggtgaccgccttttgcggtccgataggtttcatcgggctggccatgccccacgtcacgcggatgctgttccgcaacagtgaccatcgggtgctcgtgccgggcaccgttctttcgggtgcttccgtgctgctgctttgcgacctcgtttccaaactgttcaccctgccgatcaacgccatcaccgcgctgctgggaatccccatcgtggtgtgggtggtcttgcgcaataaatccgttacggcatgatagaattacacgatttatccataggctacggggatcgaaccttgctcagcgaggtagaagccacaatcgaaaagggcaaactgacagccctaatcggccgcaacggtacgggcaaatcgacgctgctccgggctattgccgggctgaaccgccgttattccggtcgaatcctgctcgacggacgccccgccgccgatacgcgaaccgcagagatggcccgaacgctggcgttcgtcacgaccgagcgcacacgcatcgccaacctcaaatgcgaggacgtcgtggctatcggccgcgcaccctataccaattggataggaaggatgcagaaggccgacacggaaatcgttatgcggtcgctcgcctcggtaggcatggaggactatgcggaacgcacgatggacaggatgtcggacggcgagtgccagcgcatcatgatcgcgcgggcgttggcgcaggatacaccgattattctgctcgacgaacccacctcgttcctcgatatgcccaaccgctatgaattgtgtacgctgctggcacagctggcacacgacgaagggaaatgtatcctgttttcgacccacgaactcgatatcgccatgtcgctcgccgatgcgatagcccttatcgacccgccccgactggtatgcttgcccaccgaagagatgcgccggagcggctgcatcgaacggctgttccgcaataaatgcgtgacgttcgatactgcgacaggtgtggtaaaagtccgataaacaatgatccgcatatgaaaacgcagcaggaactttgcgatatactcggtttcatcgccgaatacgccacctatcagctcggctcgggagttcacacctcgcgggcggtccgcaattcacgccggatcggcgaagcgctgggcgtggacgttcagttgtcgagtttccaaaagagtacgatactgactgtgctcgacctcgggagcggcgagtccgcaacccgtgtggtggcaatcccgtcgctccccatcagtttcgagcggaactctgatttgagtgccttgagctgggacgcattggacgagggcctctcgctcgacgaaatccgcagccgttaccggacgctggttgacaaaccgcgcatggacccgatcttcacgctcgtgttcgtcggactggccaacgcctcgttctgcaagctcttcggcggcgactggacggccgtgggcatcgtcttcacggcgacactcgtgggcttcgccgtcaaacagcgcatgcaggctcacgcagtcaatcactttctcgtcttcgcctgctcggctttcgtcgcgtcactctgcgccacggccgccttgcgtttcgactgcacagccgagatcactttggccaccagtccgctgtttctcgtgccgggcgtgccgctcatcaacggggtcatcgacatcatggaaggacacgtccttatgggtgtcagccggctggtcaacgccatgctgctgatcgtctgcatcgccgtcggtttgtcggccactttgttaatggttaaagattcgctgctatgatcgtgacggatattctgctcgacggactcttcgccgctgtcgccgccatcggattcggggccatctccgatccgccgatgcgagcctttccacgcatcgccctgcttgccgccataggccacgccttgcgtttcacgctgatgcactgttccgcactggatatcgccaccgcatcgcttttcgcggcctttgcaatcggtatgggcagcctatggctcggccgcggtgtccgctgcccgatgacctgtctctacatcccggctctgctgccgatggtgccgggcatctacgcctacaagacggttttctcgctcatcatgttcctccagtcgctcgatcgggctgacgaagggatgcgctacatgcagcagttttttctcaatgccaccgtatcgctgagtgtcattgcgctgcttgccgccggtgccacgctgccgatattcatcttcaagcgccgggccttctctatgacccgacgcacacgaaaaaatagttaggttatggaaattttttggaacacgatcgcggcctacaatgccgcaacctggcctgcgcagattgtctttacgggcattgcaaccctgctgcttctgttgctctgcctgcggccgacaaacactgtgcgcatcgccatgaagagtttcatggcgatgctcaacttttggattgccggagtctattacatgatctattgccgaccgcgcgaatatcacggcatgttagcactcttctgggccatcatgggtggaatctggatttatgacctgctggtgaaacacgcctcgctcgaacgcaccggccagcacaacgcattcgctgtcctgctccttgccatgccgttgatatatcccctctgctcgctggcgctgggccacgaattccccatgatgacctcgcccgtcatgccctgttcggtggcggttttcaccattggactgatgctcgccttctcggagcaggtcaatatcgtgctggccatgttcctctgccactgggcgctgatcggactgtcgaaagtctacttcttcggcatacccgaagactacctgctggcgtgcagtaccgtacctgcactctacatcttctttcgggagtatgtccgaagcaacgccgaccggccgacgaaaccctcggcccacgtactcgatgcactgctcattgcgctgagtctggtcgtcggcatcttctttaccgtcacgctcctgcaccaactcgacctattcacccaaatcatctgatttatacgcgcatgctcaaacaaatattttaccattgcaatggactcgagccgataaaccggcacataactcgatattacctttatagcccttttctcgatttaccggttctgctgacgaaggagatgcgcctgagcggctgtatagaacggctgttccgaaataattgcgtgaagttcgacactacaataggattcattaaagtgaagcaatgactgaaaaatatatcatagagaatttcacggcaggcatcggcgtggatgaatatatttcacgtttccgggatgagaaacggtttgtcgagttttgcaggcaatgccctaattacggtaacagttggggatgtccgccgtttgatttcgataccggagaatttctgcgccagtacaagtatgcctatcttatggctaccaaaattattcctatcgaaaaaggcatcccgatagacaaatcacaagagttaatcagaccagaacgaatcaggatagaaaaagagttgctggaactggagcacagatacggaggcagggcattcgcctatgtaggaaaatgcctatactgtccagattccgaatgcgcccgcaaatgcaaccgtccttgcctgcatccggacaaagtacgtccctcgcttgaagcattcggattcgatatagcacgtaccctctcggaacttttcgggatagaactgctttggggaaagaatgatattttaccagaatatcttgtgctcgtaagcggattatttcataactcgacagaaaatattatcagtcatacgaagcgtaatccggattcaggaaacctataatcttattactctcattgataacgttatgatagccattcacaaaaaagtccctgcaatccggattatagattgagggacttgatgaaagttaatgtaaaaactaaaagaataactccactttcgtatgcctgttggcttcgaccggcacatggtcagctatgccgcccctgcttaccttgacgatgcgttcgatcggtatgccacgcttttctaattctgcaacgatatgatccgctctcaatgtgcttaatgaaccattaagcacgggagttccagtcgaactgtcggccgcgccggtcactttcacggataatccgtatttcttggccacgcgagccagttcatcaaggttaagcatttgggaagcatccgtcaggtgcgccgtattgaggttaaaaaagaaatagacaggcgacccgatgcaatttccggcttgtatgagttccgtcttttcagaaacgattatgcccggttgttcggaatcatctccgttgttgccatatataatacttgcagaatcaagtggcgagattccatcccaatgccggtttttcaatcttgcccgaagtgagttcaatccgctgtaattatttctgggataaccttgacggcggtcggtctcatcgtcattaaccagatgaccgtacttgtcaagcaagccttctatttccagaattttcaacaattctgcgagcgtccgtcggttgcggtcgtaccagtctttataacgcttgttttctccggacaagacattggcataatccacgagccactcattctgacgaatgtaaggtgttgcatcaaccgcgcgtttccaaccgacctttccgagatgaaacgtgaaaccggcggtcagcgataccatgtggtcgccgaggcggttcgggcgtccgtaaccatcgaagtcctgaaaggtggtcgtgccggagagttccaacatggcacttactcgtttggaaatccgatattctccctgtacgccatacgaaacagcaaagggattattcccgttagaagcattgtgcaacaggccgacaccggcaaagggagcaagattccagcgtacctgttcttgccgggcatatctgcggccaaggacattccacagcagatccgcatggatatggtggtattcctgattggacaatgttccatctttgaactgcacaccgctgtaattgatacgtgcaccgacggacggagtgaaccattttccgactgcgaaactgtacgagggtttcaagcgtccgaagaggtcttcgcagccgagaggtgtgccgagaaaggcggacgtacccccggcaatgctgacaaaccagttgccagtccgggatgccggaagtaccactccgtcaagatagacgggctgtatcggttgccgttcctccgagacattatagtacggtgtatgttgtacagtatccacctgtacgggttgtacacttgcctgcgcctgcaacgtgcaaagcacggccaatataaaaaagatctgtttcgtcatattccaatgatattattcgttatactttttgatttgtaataaggcgtacgccacttaccgtttgggtttcttgccaatggccgggcgcatcatgcggctcgccatcctcatgcagcggagtgcccatgcacggttgtcctcgtcctcgtcgcgtccccatttcaggtcgctgccgccacctccgccgccacgagtttcggcaaaagtggtggcatcatcgaccataccgagaaacagcatcgtcgcgcagtgcatcacgtctgtaccttgttccgctatggactggacgagcgagccgtcgaacagttgccgttccgccacgtccatctgtgccgatacgttcctatactcgccgaccacattttccagcaggacatccttgagcaacgtgtccactttggaatgtacatcatgggagtatttgtaggcttcctccttgagttccccggtacgttcctcaatggcatccatgttctctttcagctcggcaagctgccggtcagccgtctgtaacttctcctgcttatctgccagttgcctgttgattccggccagttctttttccagacttttcacttgtgcggctaattgttcagcatcacccttgttcgctttcaaatcctgttcggctgccgatagcagggcctctttttcggctttcgacttctcaaggttatcgaccattgtcgtaagccccttgaccctgcgctctgccagacggatgtccgattggaggtcagccagaactttttgatgacggctgatattttcctcgatggtcgtacattcttccgatagcatacggcggtattcttcggtagtcctgtgccgtgcgcctgtttcggatatgcttgttcctctcgacattccccaccttgtattgacttcggtgaaaaagtcggtatgaagctgtttcatccttgcgctgtattcaaacttgtccttaccggcgaatatttccttgtacgcaaagcgaccgtctttgattggcaggagcgtacagtggacgtgcggattcaattcgtcaaggtgtacgatgaatgcggcgatgttctgctcgccatatttgccactcacgaatgaatagacgtctttcgcccagcgttcaatatcgctttctcttttgatatggatattgtccgcatctttctcgaaatccactttctgcgtgccgaatgcgagttcgtgcatccgcttacgggaaccgccgaaaatgaagttcaccaccgtgcggtacttcggttctgccagtccttcgttggggtctttgattccacgcctctccaatatgtccgccatccgttcgggaatgttgcggctcgtgtcgatgggacgtaccttgcctccgggtgcaatctcgaagttcaggtgtttgcgtgtggggtcgtaattccccttattcatagcgtacttttccgccctttcactgcgatcacgcaagtgttcgttactttgggctgtggtgatgcctttcgacaccttcacatcaagtacctgtttttgatctgccatactcttttcgtgttgtttcggacaatccgtcctgtcccagcttgctgcttgcccggacagcctcccgacggtcgatagacggtcggggtattaggctcccccttccctttgtttcgtggcagacgggcaagcccgtgtgcctcctataaccggcaggatgaccgttaagggatggaggcggattgttcgcgttatacaatctgttttcgactcccggttcaatccaccatcgcctgtgccttcgccagaagcgataaaaagggtttgcgaagcgatttgaggcgttcttggtcttcgtccatgtcgaagtccgtcactgatgcctcggtgtcgagaatcagcccggcgaggtctttggcggactcgatgaaagctgcccattcttcgccgaggtcaagccggaagaaatccacaagcggcgaactgtcatcgaatctcgacttgtgcaggattttttgcagggcggcgtgggcgatgcagcacagggctgtttcacgatgttccgtgaccaaagtgccggaatgtgcggaggtcgtgatggaatgggtgtccgaacagtgtccggcgtcacggtcggcaatttcagcctttgccagacttacgagttgtccacacattacgccagtttcggcagcggtcgttttgccgattacccaatcggacaatacctcacggagctgtccggcaaagtccggctgctcctgtgcatcgcggggctgtgctgcctgaccggattgtacggtcatggtaatgaccacgcttttgggaagctggatgcgggtcagcaagccgaatgcctccattgcactcaaaaaagaacggacggtagccctgtgccaatgccactccgatgcgaggtcggaaacggtcaggtagcactggttgggttgcagcacgtagtccttctttcttaaaaacggggaaacgaaacctgccagtgatttgtccaacaggtcacagtacgcttcggtgcgtgtcttgcgttcatcccctttctccttgagatattcgaatacctccctgtctgccaatatggaaacaggtatcttttggttatttttcattttcattcggttttaatgattcatattgtgcggatatgtcagtgttgccgctgtccgcttcatgcggcagatttgcgtgatgattgtcgtgataggattctgacagcattccgggatgctttgcccatccggaaagtgtccccgtgtccttgcattcggacatgacccgaacggagggatagaacagggctgccagaagaagataggtaatggttatcgccaaggtgtacagatgcggcacaaagccgatgaccagtgcgaccgatgcgagtgtgacaaatgcaccggggcggtcaagcaacctgcgtaaccagttgtccgtccatcggaacgagaacattgcggcacagacaccggtagagagtaggattccaaactcacccatatgtccacaggcatatacataatggaaaagaagcaggcatatcagccatacttgcacatacagtttacgggcgttgccgcttcgtgccattgccatgtaaaagggtgtcatgaaccgcttgttgttcttgtacaatgacattgataccccgaaaggtatcgcgcagaaaatgagtagcaggatattcagtaacataagtaatagggcttttcgggtatgggagtggggcgcacaatgagttccaactggacaataccgtatgtcgccagtcggataagggtttcggcatccttgggcgaaaagtacatggccgctttcttgatgcgctgcttgaatgtactgtcttgctttcggtagatggccaaagccttgtccagttcgtgttcgggaatagtccatgtcgtaccctcggcgtgtatgccgttcgtcttgaaggcacgcagcaccaatgtacgggaaacgaggtaatcggtgcggtcggttcttgagatgatatgctccttgtagagattgtcatcggcaacctctatccacgtccggtaggtgttgatgcaatagaccatctgtcggtataaactttctctcatatgaaattcatcagcacgtcggacttgtctttcttgtatttcaggaacccgcttttggagtgaagttccaaatcgaggcataggtccccgtacatctgctccaaagaatcatagatggtaacaaggatgctgtttacattaccctccgtatcagtcttggcgttcatcttgaacatctgtccgaaagcgggattcgagtatgcacaagtgctatgaccgaatttttccgtccgcatcgggatatggtggtaaagcgtgatcaactccatgtcgtcctcgaacatatccattacttcgtccagttcgtaaggggtgcgcaacggaaacgtaagcagcacatagtcgccgtagaactgcggttcttccatcgtcgtcacatcgagcaactgcggaagttgcagggggacgaatgccatgaagtcattataaaaatgtcgtaacatattcatatatttttctgttgtcatattttacagcgtgtgtatgaatgcttccatcagcattccgggcagctcgtccaagcggttgtctcctgggtgcagcatcctgcccaactctctgaaagcgtcgggtgtctgcgaggcaagcatatcgagttgctctctttcttcggctgaaagcaacgccaagcagaaaccgtccaacgacgaataaggctggagaagcatccagatgtaggcttgtgcctgtgccggtgtcttgactttttgattgcagatgtcgtcgatacaggttcggacattctgaatcagcctgcggttggtgcgcatggccaaataaatcatggcattgcgataggtgatgtcgttccgttcggcggcaagaaatacctgtgcgcagcatcgttccgtgtcatgcgtgatgtcggaaagattctcgccgtcgaaatcaggcagacgtgaaaggaatgcccggtacacagcatcctccttttcgataaaggtcgtcaggtctgccatacaatgaataccgtaatcaatcgtttcagcaagggtagctcgataagtggcaagaatatgttgtcggtttctctgactgacgggctggttatccaatgaggcaaagaacggccggattgtttcagccacacgatgcaactctttgtcttcaagatgcggcgagatttgttcttttacccacagtatatccttataagtgcgtgtttgagacagcaccatccgtgaaaattccatgcggatggaatcatgtatctgttcacactcttctcttacagtggaatgaagccggccaagcgtatcacattcgagatacaggaatacggaatccctcaatgtttgccattgcttgaggtgtccggtcaattctttaatggagagtcttttctgcctgcgtatgtcagacaggtattccctgtatgttccggcagggtcattcttggctttcgccaatcgtttgccattgccgttgtcgcatgacgcgcataggaatacggcaatcgaaacggcaattattttggcaaagattatcggctgttttaagttcgattttgatgttttcatactatattatttcgtactatttagtgcaaaactatatattatttttgatacttcgcatccgaaaaaccgtattttgcgcattttttaatatcgtacttaatagtatgattaccaatgaaaacaagtgaagataaaaacatgaaaaatgtacgattttcgttttttaatatagtatgattcagatactcgaataaaacttgtatatttgcacttgttatcatgaatattgtatattgatatggcaaaagtcggttatatattcgaggcgaattcctacgatgcgtttgatgcggataaggaatggatgcgccagtacgggtgtgtacaagtggttgaagaatcggtcggacacgagacgctcagaccgagatggaaacaactgatgtcgaatcttgaaagaggcgacgaattggtggtgtcaaaattcagcaatgccgtgcgtggtttacgggaactatcggcattgatcgagctatgccgcatcaaggtcgtgcgtattatctccattcacgataaaattgacaccgacaacaaattgtttccggacacgacaccggcggaagtattggccatgttcggggcattaccggaggaagtggctgttttgcggaagtcgtcagataagattatacgcctgcagcagagtatcagtattccgattaccaaaaaaagtatgagtaaaactgaacgggacaaaaaaatcgtggatatgtataacaatgggtattcaatccgtgatatttggaaagagagcggtgtccggagtaaaagcaccgtgtacagcattctcaataaatacaaggttcagcttaaccgaacaccgggacgcgtgccgggcatccggaaatagaacttataaatcaaatatggatattgaaaatcagtagattacttgcgtaattcattattttttcgtatctttaagttggatataactataaaaaataagacctatgggagatattataattttattgttggtatttttggtagtgggcaggctcttgaggggcgtcttcggcggattcagtaaaagcagttttcgggatgacaaataagtttggattgttataacaggcggatatttgttaattttgcaccgtattcattaaaatcaagaacaatatgacaaaagcggaaattgtcgctcagatctcacggcagagcggaattgagaaaacggttgtgatgactgtggtggaatcattcatggaaaatgtaaaagagtcgatggttgcgggaaacgaggtgttcttgcgcggcttcggcagctttgttataaaacggagagctgaaaagacggcccggaacatttcgaagaatacgacaattaaaattcccgctcacaacatccctgcattcaaacctgccaaagcatttctgaatgcggtaaaagagaacaagtagagtatagaagtacagatggtgcaacaacaccgtaatgagtaaaacaaaagcgacccaaaggccgcttttgtcgtgataaggcaaggattatttcttgccttttttcgctggtttggccggcttttcaggagtctcctccttctcgacgggcggatagaacttgacggcgactatcacgatacggttgtgtttcacaccgctttggtcgctccattcttcgggcttgaaatacccctcgacggtcagcatcgtacccttggtcagttggtcgaacgacccggtgttctcgtttttacgccacgcctcaaaattcataaaggcggaaacgcgtttggattcctcgccattattctccagtcggcttactgccagagggaaacgtgctacacttgcgttggtgaactgacggatttctgcatcctttcctacgaaaccggttactacgaaattgttttcaatctttttcataatgaattgtttttagaagttattaaatcaattttacgctgcctcaaaaagtaggtgcagttaagggaatgcaccaaggccggacgcatcaatactctttatttttgtccgtaggcaaaaccagaaggctcgataaaggaagattgtacggctgtgccattggtcaagacttccaaagtcgttcccgtctgcatactatctttgcatcggaaaatgatgatgacttcggcggaaaactattctgaaaatgagcggaaagccgtagttgcaggggaagtgaaagagcaatccgtccaccggcacaatggtgcgcgtttcggctgtaagtccgcagaatcggcagggattttcgtgtaattcggtcggactgaatagaggtggctacaaacagaacactgaactgacaacaggtggcgataccgcagaagggaatatcaacgaagtggcgacaaaaggcggaacggggtatcggggtgctgccatgttcccgtccggcagaaagaataggggacaaaagggaaaaaggaaagaaccctgcttttcggaaaagcggacggcagcttttcacgaatggctggtttttacaaaaggatatggcgcagccaaaagagagagatagatgtaaaaaagggaatgcggcgtggcaggaatggaagattatcccgttcctgcctgtatcatcaaaattctgccatgattacccgatgctcgaaaatctttttttgattactgggacgtctttggcagacccataggtgatgcttgccatagccgaagacgaaataatcatcaagacgtgttttttcttgtaggcgttccatgccggtacgcagttccgtttcatcggttgagaaaagaatcgtgttgatgatacggaagtagagttctgttacctcgtcacaataaggacaaaagctatgctcaatcgttgctttcatgtttctttgattttaattatacttctactacgtcttctattcgaccatacaagacagagcgcaacgcagtcttgtcaatggcgcaatactcggtgatatgtccgtgctgtttcacgaaatatcgtttgagaacatcggagaaatcaaagaagtagcccatcaatgcgatacctcttttgaaatggatgcactctttcacgtttcgggtaatccagttcttgtcttcacggctcaacttgtctccgttatcaagttgttcccgtaactggtaaaccctgcagcctttcagcttttctaattcgggtacgtcccattggacgaatttcattgctacctgttgcatcgctcttggatttaatcgtaaataatcacttcatcacggtactcgaccacctctttgccactgctaagacgtaccactattttattgccgaagtcgccgacaactgttccctcggagtagcctttatagggggtaagcagggtgcagtgcgcacctataatttcgctatctttttcgtattcgtacatagtcttgtcattttagggttacaacttgatatcccatttaccctgtgagaagattctgaagctcacgtattcgtctgcaaattcgtaggacagaattttgatataagttttgtctttggcttccaacgaagctatcagcctgtcgatttcttcttccggataaacccaacgagaggtaaactccgcatccacgctatcgctgtgtctattgacaaagccgtcaaaagtgtcatccaagaatgcctctatcttgtcgaggtctgctttgttttccgtccttgcgtagaaaatgtttgttgcatagtttgccataatcctaagttttaagttttttattttccctcttttagcatttcagctactttcgggcttgattgaaaattatgtcgcctcaaaaggtgttatggctctttatgcagggtttcacgaccaaatacgacctctgcaaagcggagcgtggagattttgtcgggaaccgtcaggctgtgaccttgaatacaagaaagacatgacaagtacctttgcgacacaattctcatcaggcagaccgaaagttgggatgcgaggataaaatgcctatggcagaagttacgataaaaggaacttccgtaaaattgggatgcagcgaaaaaagaaaatatcggtgcgattatcttctcttttgactgtgaatataaaagtaagggggagaacttcggtaaaggtttagtttagtctattagcttatatatatgctaaactaaagtaaactaaatataggcagatatattggactgcctgtataggtgttttgagggaaatggttacctttgcaaaaaacaatgttccttgaaagaaacagagatttgtccttttttcttttggctgtggttattcatccatagatgactgcaacaatcactcttggcgagaggatgaaaatcgtgtgaaatgacttggaaaaatactcaaagtacgaacaagtgaagagaaagaaaggtagtgcaaataaaaaaacaagaaaatatgataattcgtgtttctgttcctaatttgttccttgataaaaacacatcacaatataaattgttaatttataagatattaagatgtgaaattttgagatataactaaatttaccagattttcgcttgaaacgccttgcggtcttatcctatatgttggcggcgaaaagctcctgccaatcgccgtttttctcaaatgttatgcaaagatagccaaattcagtgaattacgggctatgattgcttgaatttatatttaagtccatactcttcaagtttgctgtatagtgttgtcctgcctatgccgagcagttctgcggcgacactccggttgccgtttgcctgtttcaacgcacgcaatatccgctccttatcctccgcgtcattgcgcaaggcgaagctgacagtagaggtcggtttcgtcacggcaagttccagatgctctttcatgacaacaccttcctgcgcctgcaatacagcacccataactttctgccgaagttcccgcacgttgcccggccatgcgtgtgtcagcaacgctttacgtgcttcggaactgaacccgctcacgctacactccagctctctgtttgccatatcacggaagaactctgccagcggcataatgtcttcttgacagtcacgcaacggaggaacggttatcccgaagtcgtgcaggcggtacagaagatcctgccgaaaacgcttttcattcaccgatacctccaaatcttcattggtagcagcgatgatgcggacattgaaattccggtctgccttgtctccgaccgggcgataccgcctctcctgtatggcacggagcaacatctgttgggtttccaacgcgaggtttcctacctcgtccagaaacaacgtgccgccttccgcctcatggaaatatcctttcttggcattgtccgcacctgtaaatgcacctttgacgtgtccgaagaaagccgacggtgcaagctctttggagagtgaaccgcagtccaccgccacaaatggcttgcctgcacgtttgctcttgtcatgcaacaggtgggcaatatgctccttgcccgtgccgttctcaccaaatatcatcacgctcatatcggtggcggctaccagccttatgcggtgcatgattttctgaaaggcggaaccttcacgggcgaatataggcatacggcgttgtcctgcctgacgttctttcagtatggaacggatcagggggacaagtttatcctccacaagctgtttgggaatatagtctatcgagccgagtttcatgctttccacggcggtattaacttcggcgtagtcggtcataatgatgaagggctgcatctttccctcctttcgcatccagcacaaaaggtctatgccactgccgtcaggcagacgcaggtcggcaaccacgatatcattatctgttgcctgttgcagatgtttcttcgcggttgagaggtggtaagccttcatattgcggtagccctcccgtgacagcatattgcagacatattcgcaatacacgatgttgtcttccaccacaattatttttgtcttattcatcttcgtattttctcctttcctcttctgccaaccgtattatttccactcccttatccagcacggcagtcacggcatggcttaacgcttcaccatccgggagagcatcgccacgaagcaatccgtaaagtacattcagcggttggtcggcacggagcacctcccacgaactgcgcaggtggtggatcagggaatccagcttttgcaggtctttttcttttgctgcatcccgtaccgcctgcatttccttttctgtttcagttatcaacttttccagcatgacggcttcattgccataggacaataaggcggaaaagtccggtttcccgtccggtgtcgcttttatggcacacctgtcggaaacctccatcagttccgatatggagaacggtttgaacaggcatccggcaaagccttttgccaatagttcccctttgttacaactgcccgaagcggttgccacaaccaccgggattgttggtgaattgcccacgttggacgaacgcaacagttccagcaattcgaaaccgtttatatcgggcatattcaagtctgtcagcaacaggctgtattctttctggcgtatcatttccatcagtgccgcagcatcggtgcaagtgtcgcagtgtattccttcttgggaatacatctctttcagcatcagaagtaatacctcatcattgtcaatggcgacaacatcatggaatttattgttatgataaacaggtgtattgcttgtatatccaagctgttcttcagcttcctgcatagaaatttcaactgtgaaacgactgcctttccctttcttgctgtctaaacggattgttccgccaagcatcgacacaatattacgcattatggcaagcccaagcccgaaaccctcctttgcggcggcatttgatagacgttcaaacgcaccgaacgcttgtttctgttcctcttctgtcatgcctgtacctgtatcttcaacgaccagtgtcagaactccattatcatattcagtaatcaaagaaacaccgccttcttctgtgaacttgacagcgtttgacagcaggttattcccgatttgtattattcgctctttgtcggtcaatacaatggcatcgtgtccagtcttcacggacaaggacagccctttgttcacggcaacaggcatgaactccgtttcaagtgtgtgcgtgattgctgaaatccggcagggtgacagacggggctgttccttgccgttgtccaggcggaagaagtcaagcaaagtgttaagcatatcccgcatacggtcggaggattgcagtatgttttggatatactgcccggacttatcctcacactgttctttccgtatcagtccggcatagcctgttattgctgtcagcggtgtgcgcagttcatgggtgatagtatgtaccgccttcttccttgacgttatcagtgcctcgttccgttgtacggattgttccagttgccttatcaaatcagttgtcttgtgcttgtattgtttaatgctttttgcatcacgatgtatgatgatgtaggaaattaacaacaatagaagaacgaatcccattaaaccgcctacttgcataaatgacttttcacgcatggcaactatttcgttttcccggctttgcagttcggtttgtaccttttcttctatttggcaaatcaattcttgcagttgtctgttaagttctgcattacgagctgcaaggctgtcggcttgttccgacaattggcgatcctgcactttctgttcgctgattacgtttctattgaccgaatgaaggatagtggttgatactgctggagttacttccttttttttgccgaatatgcctaagaaaccttttcgttttggctttttggactgttcctgcacacttttctgtacaataaccggaatttgattggctatcttcttgttaatagattgttgttcatccattaaccggactatctggaacatctgtcgttccttatcctctaaaagactgcgcacactatcgatgcgctctgctggataggtggccttgaaacggcagagcatactgtccattgccatacgccgtgcatggtaatgctcgatatctttatcgttccattccagtattgtttcacccaatagagaaaattttatcatttgaatattgatattgtttatttcttttcggagctcgtctatttttttattgccaagttctaatgcttctatctcctgccattcatagaggctattatatgccatacatccgataagaatggagataagtatatatcccaaccgtattgccttatagaaatttcctgaccgctccattattttaatgacattgatttttggaacatgaataaaagtttatctttttcgttcatgcggatattatcagaataaccgtcttttgttatttgatacccacatggcttaaccataaaaatgcctaagcccttagtgtacgaacttacttctgaggcatagtctttacttgtatttaatggaactttccctttaatatgacaccactcattattacaactgatgtcttcaatctcagacatcagtttttgcaaatctgtaatagctttggaactcgctacttggggtatctgcaactcaaaacagagcatcggttcgagaatgtccacacctgactgttgcaaagccagcctgaagacataaggggtcagctgtctgaaatcagcaggtgtacttaccgggctataatactcggcttgagtaaaagttactttcagatctgtcacttcccatccatgtaaaccagattggcaagacatacgaatcccttcaaaaacggcattttgaaaagaatggttcagataaccataggagatgtcactttcgatttgcaaccctgcccctaacggtaagggttcaagagtcagccctattgtggcccagtaagggttgggtggtacttcgatctgaataatcttattgaccttttttataggtcgttctttgtagatagtcttgatctcatcaaaatggacctttacggaaaatcgttcttccagcaatgtctgtatgatttccttttgggtcaaaccatataacgagatttccaattcatcactatatgagtttatggaaaaggacaaagacgggtcttcaatccacaatgtattcagagcggatatcaccttgcttctctcttcgggcttatttggccggacggaggatttgagagcgggatgctgatgagataatccttgaatcaaacaaggtttagcacctaaataatctccgattcgaaaatcttctatatcttctacaatcgcgatatcattggcacccacttcatcaacatttatctctctgccctgataaatagtctttagatttttaatcttgatgaatttttccgaatcgttgattcttacaacgtctcgaagtctcagacttccgtcaattattttaagaaaacttcttttatgccctttggggtcatgctctatcttatagagataagctgaaagtctgtttgagactgatgccggaggaagtataaaagaagaaatggcgtccaacaactcattgataccgatattgaacattgctgatccatgtagcaccggatagactttggcttttgccacaagagcgattatcgtattccaataatcagccggtgaaatttcgctatccgccaaatatcgttctaatatatcgtcgtcatggttgcatacaaattctttgtattcttcctttatatatgtttgggagcaaaccggataaaccgatccatcgacaacagtttgcataaacaggacatcttgcgacagatttgtttttatatccatatacaaacgctccaaattcacaccggcacggtcaatcttattgataaatataattgtcgggatttgcagcttttgtaaagtactgaacagcaactttgtctgcgcttgtatgccttcctttgcggataagatgaggactgctccatcaagcattttgaatgtccgctccacttccgcaataaaatccatgtgtcccggagtgtcaatgatattgcatttcactccattccagataatagatgtcgtagaagcccggacagtaattcctctacgtttctctatatccatagagtccgttatggtgtcaccattatccacacggccgcacttttccgttgctccactggcaaacagcagattctcggttacggaagtttttcctgcatcaatgtgagcaagaattcctaaatttataatattcatttggattaagcaataatatactacagtagatgcattgtcgaaacgcaccttttaatacctcctcgtagcatatgagaactacaggattactaactcgtattaatatgtatattattactgccgcataacgattacaaaattacacaaaaaaatatatctaacaaaagtgggaggattttttaactttttaccatagacattttattagggaagcgtaggttcaactggcaagtacaaataagtagaaatgtttgaacaacaccgttttaggaagttgaaaaatcaagtttctctctcggtatagcgtttattttggccaatatcttctttagtttagcatttgtgtatttcccattcgtgttctatttagctccttattatgagtatgtagcaagttacttatcaaattcagcctctttgagggtcaaatatggttttgcaaatggtgactgacaagacataaacaaggtcagcaggaattttttacataaatggacatgaatgtatataacctaaaataagaataaattttaataagggctgcccaaaaagaaaaaaatgcagttgccatcctatagatacttgcagaaaggataaaatttacttttagaccttttgggatagcccttattaatacttcagataaaattccttaggttatattttcaatcctttggaccgggtttcctccttggcatacagtcccggacgcccgattatgacatggttggcaacgatactatccgccggactgcgtatctgcggcggtgcattttcgggatattgcgcctgcctgttcctcacatcttccgcttccggcttgagctgttgcccttcattctccttttctgcgacttcgggcgtgggtggcgcaagctccagctgaatttttcggtcaagggcggcaagttcggacttcaactgcttcagctcgtcctccttcttccacaccttacccgctatctcctgtaactgcggtatctccatctccagcacctcgttcttcgccttgtactggtcgatgatggagggtatcctctccatcgcgttgaggaagttgcgggcggcggccaacgggtcagccatcgccagatgcccgttgttgtaggtgtacttgtagttcccctcgaccacgaagcggttgtcggtgaactccaatccctctttgagtatcctttcgctcaccacctttatcggaaaaccgtaaagttcaccgacctgcgtgtacaaccctccggtcgtggcattcttggctatctcctgcaaacgctttccgatgaccttctcatcggcggaatccactccgtccacctttattatattaaggcggttgccctccttgtcggtctgcaccaccgacaggaagcggttccagtcctccgtcatggcatctatgaaagccgtgttgttgcgcaactcgccggtctttgactccagcttgaactccgaatcacgcttgcccttgttgaacgacttgcgttccccttcgagcgatgcgatccgcttttccagtttcgccttgtccaacaggtcggtattgccggagagcaacgccatgtattccgagaaattcatgcccgatttttcgtccattgccccctcgtcgatggtacgcgcacccatcgcaccgcttttgagctggcttatgaaagtctgcttgcagtgcaggaggttgaacttgtagctgtccagtgacttctccaccgcgtagatgattacatccacgttgttcccggcgaaatgtttggcaatctcattacctgccctaactccgcgtccgtcacgctgttgcaagtcggacggtcgatcgggtaggtcaagggcattactgccctcttcccccctcagaaccgtacgtgagggtttcccctcatacggctcaagcttttcaaagtctctgttcgtgtgcagagaccggctcatcctacttcttgtttccattgtttttacgggataatttgaaacattcatcatgaaccaacagattgcatttccgtccgtcttgtacggtcggcattacattccatgccttatgcgtgtcaatcggttcaccacatatcggacatttccgaccttgcttttcccataggtaaagcagggatttacgtcctttcagcgtcacaagcatctttgacttcattcttttattgaagtacaggcggcagtctgcgtcaaacggattcatgtccccctttatctgcgtatattgcagaaaaggaaacgaagatgccagtttcaacaaggtaagttggtcttctttgccgtttgatttcttgaacttagccgcaaaagtccagctgttccctcggatattgtgccaatagcggtcttttatccactgtttccctttcttggaatgacggcgtttagcccattgccacaaggcgagaaatatctgatggtcgattctgtgaaaagaatcacgtgtcgccccatgctgataatatgctccccatcctcgaattttagcattcaacatcctgattaatgattcctgcttgcaacccttatgaccttttgtcaccttacggatattctccataaagcgtttttcggctttcttggtcggcttggtcaatatttcattgccgaatttgcggatgttgaaaccgagaaaatcgaaaccgtcacggatattggttatcaccgtcttttcttctgataaggtcagacctctttcagacataaagtcggctaccaatggcttgatttccttttcaagagtttcacggttctcgcaggtaattataaagtcatcagcgtaacggacaagattcaccattggcgaatataacttacctttgattctaactcgtttatatttctctgcaaggactttctgcaatccgtccaatgtcatattggcaagcgtgggagagataatgccaccttgtggcgttccctcctctgtcgggaacatctgtttgttgaagatatagccgcatttcaaccattttcggagtattgccttgtccatagggatgttggcaagcagccattcatggctgatgtggtcgaagcacccctttatgtcaccctccagaatccattcgggagaatagccttttcggagaatgttatggcattgcattaccgcgtccatacagcggcgttccttgcggaaaccgtatgaacgtgagtcggctgttgtttccgacactggttctaatgccataaggtagagtgcttgcatggctctgtctttcattgtcggtattcccaacggtcgcagtttgccattactctttttgatgtggactcttctcaatggcttcggctggtagcctctgcgtttgagttcgcttatcgcttgtgtttttgcttcgggtttctcccatgtttccatgtccactccgggggtgttgccacctccgttagaagtaactctctttacggctaaggcttttgcgtaaaaagagtgggtcagcgtccactgcaaggctttcaccttgttgtatctgccttccttctgagcctttacaattcgtgcttgtagctttctgacagccaactccgctttagtccagtctattctgtcccaaagtgtttgctgattgtcagcaggcgcacacgatgtcttgttttcgttcatttgctttcctccttttgaaagttctaaaagttaattgtaaagaatcaccatttgacaacattcggtttgattgcctacctaatgtcgtcacagaagtctgcccactttcgtgtcggatgatgtcgcccacatcagcccgtgatgtcggttcaatccgtatccgctccattacagaacggcattcgctttttctgttatcttatacctgcacaccattcggctttcattgctgtcagcttacctgtcatttttacatgacaggagatatacaggcttaccatgttccacatagataactaacggataggttaggttctgtctcatcctccggcggtgcttatatccgtgtaatcctaccatggagaggattaaccgaccgcttcccttttgggtagagtgtgccagtatcttacactctttcgtgacattacgaagtttactaacagttcgcttgcgctaaccatactatccagcctcgccactctacggtatgatactaaccgtacttgacttcccctcacggttctgtcttgtcttgcgaaagtgtacttcgtcccgaccgcttaatacaacattaaggtgcatcggtcggtaggctaccgctgacggaacagcgggttaaagctgatacccgtaagtatcattccaacaattatctatgcgacttcatgtcgcacccacggcgtatcgagatgatggatagccacacaccgtttctgggcgttcacacccgttccgagcatagaggtagagccgaacagcacacgcaccgtcccggcgttcatggcgtctatcaccgccttccgcgccttgtcggtcttgcactcctgaatgaagcgcacctcgcttggcggtataccgtagtcctccgtcagtttgcgcttgatttccgaatagacgttccacccgtcgcccggctggtatgtccccaaatcagagaaaacgaactgcgtgcctttctgggcgtcgtatttttgataatactccgcgatcatcttggcacagtgactcgctttgttgtcgggatgatcttcgtaattcgggtctatcatgcgcatgtcgagtgccattttccgggcatagtccgtggcgatgagcatcttcgccttttcttccgtttccgaaagcggcagcctgcccaacaaggtggcatcgcccgtcttggcgaactgcatcagtttctgtatgaagtcctcctgttccggcgtgggcggtatatggtgcagtatctcgttcttggcaggacggtcaacgcccacatcctccgccgtgcggtagtccgtgatttcattatagaaggcggcaagctccggcactttgatgaagtagcggaaacgctccttctggaccacattgttcgtcacgttaaattcaaaatccgtcgtcttcttggcaaatatcgccgcccaagcgtcgaaacaccttatgtcctgccgttccagctccttcgggcgcaggtacttgaacagcaggtacaattcagtcagtgagttgctgatagtcgtgccggagaggaaggtcgcacccaagtcttttcctgtgcgctcctgtatggtgcgtatggcaaagagcatgttaagtgccttctggcttccctcgctgtttcccaatcccgccacacggtcgtggcgcgtgttgaaagtcagattcttgaactggtggctctcatctatgaagatgtggtcgatgcccatctgcttgaaatccaccacgtcgtccgtgcgtgactttatggcgtgttccaccttctccagcttcgcttcaaggttgtgcttgcgcttctccaatcctttcagcatcgcccgcgacacgttctttccctgctgccgtagcacttcgaggttttcctccaccgtgtcaagctctgcttgcaggatgcgctgctgcaattccggcgactgcggtatcttgccgaactggtcgtgcgacatgatgacgcaatcgtagtcgttgttctttatattattgaagaagcgcacacggttggcggtcgaaaagtccttctccgaagcgtacagaatacgtgcgttgggatatgccgcctgataggtggctgcaatctccgcaacgttggctttcagcccgataatcatcggcttgtgtgccaaattcagacgcttcatctcatgcgcggcgatgcacattatcagcgtcttaccggttccacaggctaagtgcaaagcgccttgccgtcctttcggacggtaggtttctaaacgctcgccaccgaaccgtacgtacacgtctccatgtatacggctctccatggttattttcagtctatttccttccatgaatcttacgataacaattttcacatactgctactgtttttctctgtctggcaatcatgaagcgttcccactcctgcttgcctttcaggtctctaagcttacggacatgcaccattctaaggttgtcctcctctccgcaatattcacactcacgggctttcagccgagccataaggcttgtactttcagttccgtgataactgggcatgatgtgcgcattgtcaatacgcgcgtcttttctctgcttaaatccaccatgataaattgtacgttctaacatttcccccttgttattctcataccgtactgtaaagactttattccgacaatatttgcgaattattttccttacggttgattcatacttggatgataatgttttatacatactctctttcatgtagtaatagaaactattgagaatgttgacattgtttgcaatacagtagtagttatagattcctcgaatttccgagttatatcggttgaggatttcaaggtcatcattactacggagatatggacgtgaggttgattcccatacttccttgccgttcctgattattatgcgcatcgcattataatcaatcagtttctttctcattacctcgtaaggcaggagaagaaccactttatggtcaagtgaacgaatggggattcctctgaaatcctttcttgtcttgtccgtactgcggactgtaacgtcaaagccgagaaatttggctgtgtcgtgtgaattggtgattagcgtcttttcgtccgaaagttccagtttcagcatatcatgcagaaaggttttgatgtccccttttgctgttacacagtcctttttacttccgattacgcaaatcagaaaatcatcggcatagcgtacgtacctcatgcgtttgaaattttcgtccatgtcaagagttgcaggaagttgttgcatctcacggtggagaatggctatctccttgcggagtacctctttctttaacccatctgtttcattcttcagtttctttacacgtttatctttacggcttgcaacccttttgtattcaggattgcgcacccttgctttacctgtattgaaagcatttatgtagttctgcataaatttgtcgagtttgtcgaggtaaatgttcgccaaaatcggacttattatgcctccctgcggagttccgatataggtatttttgtactcccattgctccatgtagcctgctttcaggaatttacgtatcagtcgcaggaaacgttcgtcattgattctttcggcaaggatttcaattaaaacatcatggttgatgttgtcaaagaatcccttgatgtctccctcgataaaccaacgtgttcccgtacctcccttttgtaaggaagccatagccgtatgacagccacggcgcggtctgaacccatgcgaacagtcttcaaaatggccttcgtaaatagattcaagaatcatcctcacaatttcctgtacaagtttgtccttaaaggcagggatgcccaacggacgttgctttccattctttttgggaatgtaaattctgtgtgcaggacacggacggtaactctcgtccttcaactgttcaatgatagtatgaatgtgctttatgctcattccgtctatggtctgcccgtccgtgcctttcgtgcagttgcctgcattctgcgacaacttctgataggcaagtgcgtacaggttttcattgaacagcagtcggtaaagccgttcaaacttgtaattaggatcttggctgtgcccagccagactgtttaatacatttgttgaatctctcataatgtctcacacatcattcgttaaacatattaaataataactcactgtctcccttcgccatgtacaaggctttcccttgctcggactactacggagactctgttgccatataggatattcaggggcaaatcccatagcctttcggcgttcctacttagacaatccccatttagacatatagtaacatagcttgatagattgtcggatgcgattttcgtccttttccgcttattacggctgttctgcaatcggttttcggctctcatactcgaagtcggaaagtagaagtattgcagcccgacgtttgtaactatcttccgtcggggtttaccaactaacaacttggactgtcgttcaaacagtatagtcttcatcctcatatctatcgtttcatttagacattcagtagcagtacgatagtttactgacttatgccgtttccaacatgcgacactccccaccgcctttcggctaagtggataagttggctaatgaccggcgttgaaaacccttaccgggtaggttgctaatcctacatttactatatgcccttatgggcgcagcacctcgtggtcgcaaattccgccgccgttctgtttcaacatccagacgcaatccatctgtgagggatagacgctcttgataccccggcttgccagccctttcaggttgaggtcgggaaaggtctgatgggagccgtcgtagcgcgggcgcacgaaacagttgaacttgcggttatacatcgtcacaagccgctccttgaactgcggcgactgctcttcgagccattcggagaagccgtttcgtatctcgtcaatcttggcgttggcgagttgtattccctcgctgtcgcgcatcttgatgtcgttgccatgctcgtccttgccgatggacttcatcatgtcagggcaggtgttgtgcagggcgtgttttaggaggtgcataccgtcatagttccggtaataccccttcaccagaaactcgtccgtgattttcatggtgcggtagccgcacaccaccgaaaactcgtccatgcttgcggaataggcgattttcacctccgtgtcgaacagccggctcatgtaggcggcatagacacccgtcggaatccagcgttccccgaaattgaagtccagatcctcgaaggcgatgcgctgcggctcggcatctttcagagcctccaacgcctgcttcacctccggcatacgctcattttcgggattgtcacccatccatgcctctatgcgttccgctttctctatgacatttccggcgatgaaacggtctttgatttcgtaaccggtcacgagcggattgtagtagatgcgcccttgcagggcagtgagcaaatcctccgccgtgctgtcggttatctcccgcatatagtcgagattgaccgtaccatatttgttgagcgacgcagacagggcttcttcgggagagcctacgttggcatggctctccaccgcgaaggaaacaggatgctcgaagatgtccgccttgacgaactttccgttttccatccgttccagcgaaaggatgtcgcgcccgcccgcatccatcatcactaacttcacgttctgcttggcgttgaggttgccgtagcgcatgacaaactcatcgtaacaggtattcagatgctctcgccacggaacatttgcctcgcgccggagcgattcataacggtacagacgctcgtaggcgtcacgcagcgacacatacaacaacgccttttccttctggtatcctttcaggtcgagcggctggaatgtcgccccgtatggcgtgatgtctttcaggtagccgatgttatgacgcccccggtcagccaccagcgacccttcgcgcaggtgcatctccggcgtgcggtggtaggcacgcggagaaaggtccacgacttcctccttcggcttttccgcttcgatgtcggggaaaaggaaagtccccaccgcttccgatggggtatctgtaacggcaggtgcggcgactgcctccggctgtgtttcctcctgtcgtggctgctcacgggaagtttccggcacggctttcacttccgtcttttccgccacttgtttctcgttatgctgccttgccagttcccgaagttctttcctacgctccggcgtcaaacccatcatcatttcatagaaaccgttgatgggaggattggtatcccagtccagtgtggcatagatgtcgtccgggtcggcaggcttggcggtgttctccgctttcacctccttattctccattgcgggttttgcagttggagctgtcggtgtaaccgtgactttcggtttgggcggagtggactttgccgtaactgcctttttcaccgtctttttctttttggaggttttcggttggctgacctcttccgtcatcccccagaggtcaagcagggtgagctgcacgcctgcggaatattgcgggcgcggttctatctccggcttttcatctgcgggttgcggcttttctgtcggagtttccaccgtctgcgccgaggatactgtttccaattttatggcaggacgctctactttattttgaacggcaactttttcttccgttcctgcctgccggattgaacccgaatacaagcgcatggcaagcctgtaatggaaatcctcgtcgagcatacggcgcaaatccccggcgatgcctgctgccttgccctcgtgcagataaaccatagcgggcttcccgtaggggtctgtgtcaagtttcgccatcgtatgcacgatgcgttccgggtggtggatgaaataggcgttgtcggtcagggcggttttcgtgtccgtctgtatcacggtcatcagccgctcgtcctgcgacatttccttcttgctgaggttcttttgcaggacaatcaggtcactgcccacctccgtgcccgcgttgtccgtgaacaggttgttgggcaggcgtatcgcggataccagattggcctgactgaacagctcgttacgcacggaggtcttggtgctattcaataccccttgcgaggtgatgaacgccacgataccgccgtcacgcacggcatccagtcctttgagaaagaaatagttgtggatggttttctgggcggagcgtctgccgaaagagtcgctccgctgaaactccgcgtcgaacacggcaatgtcaccgaacggaatgttggacaccgccaagtcgaaataattgttgaacggtctttcgattttctcaaaaccgcaggtgcgcattttctggtcgggatagagatgcctcaagattgtacccgtgagcagatccttctcgaaagccatcacatccgcattggggctgtgccgcagcatggaatccacgaacacgccgacacctgccgacggttcgagcatacgggcggggcggacgctgtaatctgccagcacgtccgcgatggtgtcggttatctctttgggggtgtagaaagcggtcagcacggacgctttcagcgaatccacaaaccgcttgtactctgtttcgtccttgctgttctcacggataagcctgtgcagctccaccgtcggggcgaacagttcgaggtcggatttcgcccaccggacggcatccgtcagttcctttgcagggttgaggatacatttcagaccgccgaaaccgcagtacctttgaagtatggcacgctcttcggttgtcgctgtcctattttccctgtcaaggatgaatgccgtccgtatcgcctcgatgttgtcccgcagtttctgtttgcggttaaacgccatattcgtctaagtaaaggacggttgctcccgtcagctccgtgtagagcaggtcgtaatcggaagacagggcgaaattgtcatccgagaggtcatagacggagaacacgttgccgacaagcggcagcagtttcaggacaaaggcttcacgcttctcttccggcacttcatcggcaaactcgttttccacgacttcgcggaggatggcgtaacgggaataatgcagcccgcgcagcagcgtgtccatcgccagttcctgcgcaccatcggcgggatagccttcaagccgtgccctctcatacgtttcggcggcacggtcggcccgttcccgtatgaaagcggtgtcgtcagcctgttcaaacttgttcgtgcggagatagtccagcaggtacagaccgtaataggaaaagtcggtctgaccctcgtttttcttcttgttgttcattactttggatttagcggattgataattaacgggataatcggttggaaaaaggaagaaaaaggcactcggtatccctccgagtgccaccactaaatccaaagtatgagtgtaatccggtatcgaagaacaattcattactctgaacaagtggcaaagttaatactatttcttccgtcctgaaaatttcttgtcctttttagcctccgggaacacaaaagtcgtgttatattccccgtcaaaggcgacaacagcatcgaaactcttgccctgtttgctcttgaaccctttgagcagcttggtatgcccttcggtgagcaggtctttgatttcatcgtcggacagggtgcgtcccgctttcagccggaacacgggcagtccgcactccgtgttgtcgcagcgtaccaccttgccgtagaaccgcatcctgcccgtgccacacttgggacacgcgcagccggagtcacggctgccgaagagcttgtcgcacgagatcagttcggaggttatctcacgtgtgtacgcctctatctccttgcggaaggtgtcgtcggacagttccccgcgctcgatacgcgccagctccttttcccattcgcccgtcatggcaacatcggcgatgcgcatcgtcttgacgacggaattgagggcaagtcctttttcggtgggaacaagcgacttcttgcagcgttccatgtaaccgcgcttgaaaagcgtttcgatgatggaggcgcgtgtggcgggagtaccgatgccacagtccttcatcgcctgccgcagtgcgtcgtcctcaatttccttgcccgccgtttccattgccgagagcagggtggcttcggtatgcagcggcttgggtttggtctttccttcggtaatggacgagcctttcggtgtcagcgtgtcgccttcctgccagccggggatggtaatttcctctttttcctcgccatagacggcacgccatccggtttgcttcacgacgctgccttttacggtaaactccactccggcacattccgccgtgacagtggtcacatccttgacgcatttctcagagaatgcctcgaccatgcgcccggcaatcatctgatagatggtattgtcctctttggagaggaagagcggtttctcacccgtgacgagcagggcatggtggtctgtcaccttgccgtcgtccacgctgcggcgtgtcggggcggcttttgcccgcaccttgtctttccattcgggctgtgtgccgatgaaagcgagcagtttgggaatttcggcaaacacgtcttcggggatgtagcggcttcccgttctcggataggttatcaacttcttttcgtagagtttctgcgcgatttcaagcgtctgttccgccgtgaagccgtgcttggcgttggcttctttctggagcgtggtcaggtcgtagagcaagggagtttcctccgtcttctccttgcgctcggctttcgtgacagtggcgcaacctgccgcctttaccttattatatagttccatcgccggttctttctctttccatttctcggaggatgagaatttcacgacttcgccgtcgcaaccgtccgttgcgatatggagctgccagaatgcttcggacgtaaagcggcggttctcccagtagcgttcacataccatagccaacgttggtgtctgcacccgccccacggaatacgtgccgtgtccggcggcgatggataacgcctgtgtgccgttgatgcccacgagccagtcggattcgctccgcgctttggcggcgaggtagaggttgtcgtatttgctgccgtcttcgagtttccgcagtccctcgcggatagctttgtcggtgagagagctgatccacaggcgcacgaaaggagtggtgcaacccgtatagtggtagaggtagcggaagataagctctccctcgcgtccggcatcggtcgccacgatgatatgttcgcttgtgtcgaacagtcttttgatgacttttatctgcgacaccacgccgctgtcgggcttgtaacctttctccgtcctgacctgacgggggacgagcgtgaatgtgtcgggaataatcgggaggttgtcacggacaaatccgcgcacgccgtagccgtcgggcatggcaagctgaacgaggtgtccgaatgcccatgtcacggcataaccgcctccctcgaaatatccttcctctctctttgtcgcgcccacgatgcgggcgatttcacgtgccacggagggcttttctgcaatgattgtcttcatgtcttcttcttttttgttgatactttggattttattttggattcagtggcggacacgggattacattttcatgcccttgcccgttttcttctgcggcttctcctgctgctgttgctggcgggcgtccttcgggttggtctgacctttctgcaacggctctctcagattctttgtagcctcgttggtcttgccatcgttgttcaccgccacctgcgtgcggctctcgttggacggagcaacctgctgtgcattgtcagggttcgtgtcgtagcggtacgggcgtcccttctccgggttgaacttgatatacatcgtggcatggaagccctgcttgtcggtcacgttctccagcttcacggctttacccgccacatagtcggctttctgctggtcggtgaagctcacgccgctccatttgctgatggggcggatgctgccgtcctcgttcgtccacgtgttgcggcgttgctccttcttggtctgtgcggcattttccccgccctgcgcctgacttttcgatgtgtcgcctttggtttcctgtgtctgtgcggtacggggcgacttgccggttcccggcacgaactccacgccgcgctgctccacgttcacttgcagggtggtgacgaactttctgccgtcgttgcgctcgatgagcttgtcgcgtacgggcagtccggcgcggagcatgtcccgctcctgcgtggtgatttccgtcttgccgatgcgctccgggatgcgcaccctgcttgccggaatgtccgtgatttcattcgtcttgcggtcgatgctgatgtaggaggggatgatctcgcccgtttccctgtccacaatgtccacgaccctaccgagattgcccgtttcgcggaggttcttccggtcattgtcggagaatttgtgttccttgtactcatccagcttctgctccttgcggatgaagtgcggcacgaggctgatgtttccctcaccgtccttcttgaaggagaggcgggcgtccagctcgaatgattcgccgccgaaggtcggtttgacctttaccaagtcggacttgccatagttgagcatcttcgtaaggtcgccggacttttcaaggttgtcccgctttacgccccatctgtcctccagctcctgccagttgattttactctcgtcgatgggctggtagccacgtttgccctgcatctgttcggatttgtcctgttgctgttctttccgttgttccatgttctcctgtttttgaggttcttgtttctctgtctgttgtgctgccatctcttcctgcaccttcttctcatagtcggaggtgtccaccttgtgaggggcgagcagctccttgttcgcttcggggtctttcagcagttgcttcatcacctctaagagattttcagcttggtctgccgcaatgcggtagaaaccgaagcggctgggttccttgcactgccggaagaagttcttgaagaagttgtccagcacgtcgccatgtcggtcgaattgcaggaaactctgcgcgttctccgcttttgcgggggtgcgcttgggtgtgccgtccgcgttcagcccggctaccacgctgatctcgcctgtcttctcgtcacggactaccagcacgtccttttcgtcttttttctttgccatctgaaaaatgttttaatgggttatttatgaaagaaattatggatacgagccttgtagaaggctatatcttcctttttgaagtccttgatatggttggaaaggaatgtcagcacgtcctcctcgctgtaataggtcttcttgcccagcgtcttgtagggcaatgcgcctacgctgcggtagcgttggagggtgcgtttgcttatctggagcaacatgcacaaatcctgattgtcgaaaaggcggatgctttccgtgatagtgggctgtttcccctcagccttcatcgccagcagcagttcgtcctgacggtcgagccgttccatcagcttctgcatccagccctcgaagttgtttcgtgtgagcagttccatgacctatgtcctccttccttttggtttgccgcccgtgcgcagcgtgtggttgtggaacagggtgtctattgtcccttcctcgttccttactgtgttgtcctccaatagccgcagtatctcggaaaggcggtagcggcagcttccgcgtaccaccacatactcgatacggtggtcggtgcgcatacgctgcatggtgcgcttgctcacgttgagcatcttcgccgcctgtgccgtgtcaagcagcttgtcttcggtttcccgcttccgtttcttctcgtcccttgcctcgcggatgtaccctgcgatgttcgcaatctgcgccatcatctccttgtaggcggaactttccattgttatcactttcatgttcagtcctttctttttgtttctgcgacaaaattcggcaataaacaaaaggggctttaacaactcactacgtgactcacgtaagatttttgcggaagatggctccgtaacccggtcaaacggcgcaacaggcagcctttcagcggaaaacgatacgtcttgtatgccgtttcgttacctttgcggcaaactctaaatgacatgaatatggaaatagtatctatcgagaaaaagactttcgagatgatggtggcggcattcggcgcactctcggagaaggtcgccgccctgaggcgcaaaagcgacacggggcgcatggaaagatggctcacgggcgaggaggtctgcgggcagttgagaataagcccgcgcacgttgcagacgctgcgtgacaggcggcttatcggctactcgcagataaaccgcaggttctattacaagccagaggaggtgaagcggctgataccgcttgtcggcacgctctatccgcacggcagatgatttgatttattcacccactgaatccgaagttatgatgaacgagaacaacgatgtttttacgatggaagacgagccgatagcctctgtggtgcaggatatgcgcaaaggctcgaaatggctgtccgcatttctggaaagctaccgtcctccgctggacggggaacgttacctgacggacggcgaggtgtcggaactgctccgtgtgagccggcgcaccttgcaggaataccgcaacaaccgcgtgttgcccttcatacttttgggagggaaggtgctttacccggaaacggggctgcgcggggtactggaagcgaactaccgcaagccgctggagtgaggcggtttcatgaaaaagtaaacgggtgacaccttttgtggtgctacccgtttacttgtcttatggggtatgtgcaatcagcaatacccggcttttccgttctgtatgaacatcacgtatgtctgccgtttctcttgtgagagtgcctttcccaccagccatgtgcggaacaggtgggtgttgtaggtattcaccctgaaagcgaccgggatgatgatttcaagggcgtacacgtccgcgtgcagcccgttttcaagctgcatgtagcggcacacctcgtagtcgttcagcacgtccgacttgcggacggctctgatggcggcgttcactgccgggacggtcgtatggaacaatccggctatttcggtggcggtcatccacacgtcgttaccggttacgctgactgccttgtcctcgatgatgattgtgtcacgtttcatggcttttctttttagatggtgcaacctgcaaattcctcgacgccgttcaatcttgcggcaaggttctccatgtcctgattgagcttctctttggttatctttgcgtaaatctgcgtcgtctttatgctcttgtgtccgagcatggagctgaccgtttcgatgggaacaccgttggagaggaatatcgtcgtggctgccgtgtggcggctctgatgccacgtgatatgcttggtgatgccgcaacgcttggcgacggcacggataccggcaaggcacgtgttataatgcggaacgggaaatatcctgccgtccccgcacagtccccggtatttgccgattatgcggttggcgatgtcgagcaggcggatgttggacaccacgcccgttttctggcggttgatgtttatccactcgtgttcgtcgaagtaggtgcggatattctcttccgtaaggttgcgcatatccgcgaacgacagccccgtgaaggcgcagaacaggtagaggtcgcggtacaattcctgtttggcgtttttcagtttcccctccatcagcaggcggatctcatctttggtcaggaaactgcgtgttgtttcctccttcttgatttcatactcgcggaacgggtcgcgcgtcagccactcgttgttgatggcgatgaataccatcgtccgtaacgggcagacgtacagccacacggtattggtgcagcagtgcttgtccgtgcgcaggaacatctcgaagtcggagatgaaagccggggtaagctcttttagggcgatgtccttcacatggtagcggatgtcgaggaactcttgcatgtgcttgtaaacggtgcggtacttcagcagcgtgcctttggctttcatgcctgcctccacctgcttctcgtagtcctcgttgtgctggcggaacacctgcatcagcgtgtggtagcggtgttccagtccgagaaaggcgttcttcaccttctccgccgtgacgaagttgtcacgctccatgatttcctgataatgcctgttgatgcgtacccgcatcttgtcaagcatacggttcgtttcgagtgccgccgtgcttctgcccgtgacacgtccacctttggtgtcccacagtttcggatcgacagtcagtttgcagctgaactgtgtctggctgccgtccaccgtgatgcgtcccatgacgggaactgtcccgtcctttttcactacctgacgcttgaggtagtagattactgaaaatgtactcttcattgtccttaatttttgggtttcaaaattagttggtgaagagtccggtgttggtacgcaaaacggggaggaacggcgcaatctttttccgtaacctgatttttcgcatgagttatggataactcactattccttagagccttgtttcgctattcgtacccgtttgtcgcattttcgggcatggttacgaacaagtaacgtagcggcgtcaggatttggcttcggcagggattgtaatggcttcacggattatcgccacttcaaccaaaacccttgtaactcaattctatcactatatctttccgcatttcacttttttgtagtaactttgcaccacgaaaaacttcaaactaagagaagatgaagaaaataaaaacaatctaccctgttatcctgttgacattgcttttgctggtttcctgtaagtcgaaaaagaatatggtggctaccttgccacgccctgttttaaattcagattctatttatccggatacggctaatgccatagccgggttattctcccccgaccactcgcaactcaaagagctgaatgtttccaaaaacaaaaagcagaatacaaaggaaaagacttctaccgatacacacgaatcgtcggatctggtactgcggggaacaaaaatcacttcttccagcgtagatgtatcttctgtctataccggagtggaccgtgtagtaaaatatgactttacacaccgcgatgttcccgaagcctttgaaggtttccgtatcgctttcatttccgacttacactacaaaagtctgctgaaagaaaaaggcctgaacgaccttgtccgcctactgattgctcaaaaggctgatgtgcttctaatgggtggtgactatcaggaaggttgtgaatatgtggaacctttgttttccgcactggcacgcgtaaaaacaccgatgggcacttatggggtaatgggcaataacgactacgaacgttgccacgacgatattgtgaatacaatgaaacattacggcatgcgtccgttagaacatgaagtagatacgcttcgtaaagacgggcagcagatcattatcgctggagtgcgcaatccttttgatctggggcgcaacggagtatcgcctactctggcactctctcccaaagattttgtcatcttactggttcatactccggattacatcgaagatgtttcagtagctaacaccgaccttgccctggcaggacacacccacggcggacaagtccgtgtattcggagttgccccggcacttaactcacactatggcaatcgtttcatcaccggactggcatataattctgcaaaaatacctttgattataacaaacggaataggaacctccaaattaccaatccgtgtcggcgctccggcggaaatcatcgttattactcttcatcgattaacggagtaaactggatagcctcccaagcctttggatgcacaaagtatcgaacatctttccctgcatccagtgcttctcgaataaaagtagaactgatttcaaatacaggagaatgaacgagacgcaccgtttccggcaattcctcctctttgacgggaaagccgggacgggggtaaataagaatctgattctctttaatgatacgttcggactgataccaatatccaaaacgttcccaattatcggaaccgataatgaaataaaactcgcgatcgggaaatgcctcacgcagtttctccaacgtatatacgctatatgaggggcgaggcaaatgaaactcaaaatctgaagcctgaaaacgaggatagtcactgatgctcaactttaccagttcgagacgtaattcatcattccataacttctcctgtgctttcaaaggattctgcggactcaccataaaccagatttcatccaatccttcatactcacaaaggtagttggctagagcaagatgtccgatgtgaatcggattgaatgatccgctgaagattccggttttctgcttattcattgttccaaaaactctttgataactttcaaagcttccgctttagcagtttccaaattgtcattgacaatcacacaatcgaattgcggagcaaaacccaattcatattccgccttagcgatgcgactttcaatcacttccggcgcatccgttccacgtccttccaaccggcagcgtaattcttccaccgaaggcggctggataaacaccgacaacgcacgatcgccataaaacttcttgatattgcatccgccaaccacatctacatcaaacaccacattctgacccgctttcaattgcttttctacctgcgctttcagcgttccgtaataacggtccttatacacctcctcatactccagaaattcgttgttctcaatgcgttggcgaaattcttccggcgtaaggaagaaatattcaaccccatgctgctccgttccacgcggaggacggctggtagcagaaatagaaaacgctaaattcaagttctgcgtcagcagataattgattatagtagatttgcccgaacccgacggagcagagaaaataattagcttaccggtcataagtttaatgaagaattaagaattaaaaatgatagatactgttttacatcacgttcagcacctgttccttaatctgttccagttcatccttcatctgaactacgatcttctgcatttcagcatgattggacttgctgcctaacgtattgatctcccgacccatttcctgggcgataaaaccaagcttcttaccctgtccgctaccactttccatcgtgctgatgaaatatttcagatggttgctaagacgttgtttttcctcgttgacatccagtttttcgatgtagtaaatcagttcctgttccagacgattcttgtcgtagtctacgcttaacgtcttttcgagagcatcagtgatgcgttccttcactttctctacacgttctttctcgtaaggagtaatctgttcgagcaaactgttgatgttggcaatcttctcacggaatttcttttccaatgcagccccctcctgtttgcggaaatctaccaaatgactgatggcttcaagtatggtagcatgcaccatgctccattcctcttccgtcagttcctgaatttccgttttcgtcatcacgtccggcatgcgaagtaatagttggagccagtcttccggtgcgggacaaggaatccccagttcgcggcttatcgaatccaactggctataataacttttcagtacatccttattgatgggagcagcatccgcaccctccttcttctctatccacaggctgaagtcagcttttccacgttccagaactttagaaatctcattacggatttcaatctctttttcacgatacgccggagcgatgcgagtggacaaatccattgccttgctgttgagcgacttgatttctacatttatttttttatcaggaagttcggccgtagctttaccgtatcctgtcatagactgtatcataaccttaaagttttgtgcaaaagtacacgaatattttaagaattggaaataatcatgtaaatttgcgacaatttaataagctgatttttatgtcgtgtatactgaatattgaaacctctacctctgtttgctcggtagcggccagtcaagacggacagacgatttttgtgaaagaagacttgaaaggcccttcacacgccgtgtctttaggagtttttgtagatgaagcattgtcgttcatagacagtcatgccatccctttggatgccgttgcagtgagttgcggaccgggttcgtacaccggactccgaatcggggtttctatggcgaaaggaatttgttacgggcgcaatatccccttgatcggtatcccgacgctggaagtattgagtgttccggtgctgttgtatcacgacttgcccgaaaacgctttgctttgtccgatgatcgacgcccgccgcatggaagtatatgcagccgtctatgaccgtcgtctacaagtgaaacgtacagttgccgccgacatcgtagatgagaactcttacctggagttcctgaacgaacaaccggtttatttctttggaaacggagccgacaaatgccgcgaacagatcacgcatccgaacgcacattttatcgacaatatccatccgttggctaaaatgatgttcccactggcagaaaaagcagtggccgatgaagactataaagacgtggcttacttcgaacctttctacctgaaagaattcgttgcctccatgccgaaaaagcttctttaattttttaatttttaattctcaattttaatttaacaaatgcaatacaatactcaacagaaaagaatgccgcttcccgaatacggacgtagcatccagaacatggtagattatgcgttgaccattcaggatcgtgcagaacgtcagcgttgtgccaacaccatcatcaacattatgggaaatatgttcccccatttgcgtgatgtacccgatttcaagcacaagctttgggaccacctggctatcatgtccggttttgagctggatattgactatccgtatgaaatcatccgcaaggataatctggtgacccgcccggaccatatcccctactccaccgcccgtatgcgttaccgtcactacggacatacgctggaagtactgataaaaaaagcgatcgaattccctgaaggaaacgaaaagagaaacctgatcgctcttatctgcaaccacatgaagaaggattacctggcatggaacaaagatacagtggacgacaaaaagattgccgaagacctgtacgaactgtccaacggggaactccaaatgaccgacgatatcgtccggctgatggcagaacgcctgaatcagaactaccgtccgaagacgaactataccaacaatcgtcaaaacaataaaagaagatactaaaacactttatacttaatactaaaaaaattaatggcttcatttgtaatcgaaggaggacatcggcttagcggagaaatccacccgcaaggagctaaaaacgaagttttgcagataatctgtgccacgttgctgaccgcagaggaagtgacggtgaacaatatacctgacattcttgatgtcaacaacctgattcagctcttgcgggagatgggagtgacggttgcaaagaaaggcattgattcttatagttttaaagcagaaaatgtagacctggcttatttggaaagcgatgaattcctaaagaaatgttccagtctgcgaggctctgtgatgcttataggtcccatggtggcacgtttcggcaaggcattgatttccaagccgggaggagataaaatcggtcgccgccgtctggacactcactttgtaggtattcagaatttaggggccgacttccgctacgacgaagagcggggtatctacgaaataacggccgacagacttcagggaagctatatgctactggacgaagcatctgtcaccggaacagccaacatcgtcatggcagccgtacttgccaaaggtacgaccaccatttacaatgccgcctgcgaaccctacgtgcaacaactctgccggttactcaaccggatgggagccaaaatcagcggtatcgcatccaacctgctcaccatcgaaggcgtggaagaactgcacggcacgcaacacaccgtactgcccgacatgattgaagtgggcagcttcatcggcatggcggcaatgacgaaaagcgaaattaccatcaagaatgtttcttacgaaaatcttggaatcatccccgagagcttccgccgtctgggcatcaagctcgaacaaagaggagacgatatttacgttcccgcacaggaaacataccagatagaatcatttatcgacggctccatcatgacaatagccgacgccacttggccgggactgactcccgacttgctaagtgtgatgctcgttgtagccacacaagccaaaggcagcgtactgatccatcagaaaatgttcgaaagccgcctgttctttgtggacaaactgattgacatgggtgcacagatcattctctgcgaccctcaccgtgccgtagtcatcggacacaaccacggcttcaagctgcgcggcgcccgcctgacttcaccggatatacgtgccggtatcgcccttctgattgccgccatgagcgccgaaggaaccagtaccattagtaacatcgaacagatagaccgtggttatcagaacatcgaaggacgtctgaacgctatcggagccagaatcacccggatatgataaagaaagaagaagtatacaagataggattattcaataaaccgcacgggatccacggcgaattgcaatttaccttcacggacgatattttcgaccgtgtggactgtgattacctgatatgcctgctcgatggcattttcgtgcctttcttcatcgaagaataccgcttccgttcagactccaccgccttggtgaaactggaaggagtcgacagtgccgaacgtgcccgaatgttcaccaacattgaagtctacttccccgtgaaacacgccgaagaagcggaagatggcgaattatcctggaacttctttatcggtttccagatggaagacatccatcacggacttctgggagaagtcatagatgtagataccactacggtaaacacccttttcgtggttgaaggagcggaagaagaggaactgctcgttcccgcccaggaggaatttatcgtaggaatagaccagaaacagaaactcatcacggtggaacttcccgaagggttgctcaatctggaggaattggaagatgaccggtgagaacgaatcaaacgatgagccgctcatccactgaaaatagtaaatagtaaatcgtaaaaacagtaaatacccgagatgccaaagagaagacgaagtaaagctttctggaaaaatttcaagttcaagtataaactaacgatcgttaatgaaaatacacttgaagaaattgtcggacttcgcgtatccaagctcaatggactttccgtattactttgcgtgctggcggtacttttcctgatcgcttcctgcatcatcactttcaccccgctgcgcaactacctccccggatacatgaatagtgaagtccgtacacaaatcgtggacaatgccctgcgtgtagactctttacaacaagtgctcaacaagcagaatctttacatcatgaacattcaggatatcttcagtggaaaagtatccatcgacagcgtgcagacactcgattcactgaccactgcccgcgaagacacactgatggaacgtaccaaacgggaagaagaattccgccgtcagtatgaagagaatgaaaaatataacctgacctccatcacttcccaaccggacgtgaccggactcattttataccgtccgacacgaggtatggtgtccgaccacttcaatgccgagaagaaacattacggcaccgacatcgccgccaatcccaacgaaagtgtattggcaaccatggacgggaccgtcatcctaagtacatacaccgccgagacaggttatctgattggcgtacaacataaccaggatttaatttcaatctataaacactgcggctccctcctgaaaaaggaaggtgaacgcgtgaaaggaggggaagccatcgctctggtaggaaacagcggcacacttagtacagggccgcacctccatttcgaactttggtataaaggtcatccggtaaatcccgaaaaatacatcgtattttaagtgataatagaaaaatgaatatagagactaacaaaaagaaaaaacaaatagctatcctaggctcaacaggctccatcgggacgcaggctctgcaagtcatcgaagaacatcccgacctgtacgaagcctatgcgctgacagccaacaaccgcgtggaactactgattgcccaggcacggaagttccagccggaagtggtagtgatagccaacgaagaaaagtattccgaactgaaagaagcattgagcgacctgcccatcaaagtgtacgcaggcacagacgctatctgtcagattgtagaagcaggccccatcgacatggtgttgacagccatggtcggttatgccggactaaaaccaaccatcaacgccatccgcgccaagaaagcgattgcgttggccaataaagaaacattggtagtagcgggcgaactgattaatcagttggcacaacaatatcgcactccgattctgccggtagactctgaacactctgctgtttttcagtgtttagcgggagaagtgggtaacccgatcgagaaagtgatattgacagcctccggaggtccgttccgcacttgcaccttggaacagctgaaatccgtcacaaagacgcaagccttgaaacatcccaactgggaaatgggagcaaaaatcacaatcgactccgcttccatgatgaataaaggttttgaggtgatcgaagccaaatggttgttcggtgttcagcccagccagatcgaagtggtggtgcatccgcaatcagtcatccactcgatggtgcagtttgaagacggagctgtcaaggcacaacttgggatgccagatatgcgcctgcccatccagtacgcattctcctaccccgaccgtatcagctcttctttcgacagactcgatttctcccaatgcacgaatctgacgtttgagcaacccgatacgaaacggttccgcaacctggcactcgcctacgaagcgatgtaccgcggagggaatatgccctgtatcgtcaatgctgccaatgaagtagtggtagcctctttcctgaaagacggcatcagcttcctcggcatgagcgacgtaatagagaaaacaatggaacgggttgccttcatcgccaatccgacatacgacgattatgtagctacggatgcggaagcaaggaaaatagcagccagtctgatatgatccgcttcatcccattgatgaacaaagaaaataaagaaattgattagtattaatataaattgaaaatagcctttatatcctctcttcggtagagaattagttgaaggctttaaactgtaaatagactatatggaaacatttttgattcgtgccctgcaattgattatgagcttatccttgctcgttatcgttcatgaaggcgggcattttctttttgcccgtttgtttaaggtgcgtgtagaaaaattctgcttattttttgacccttggttcaccctttttaagttcaaacccaagaaaagtgacacagagtatgcagtaggctggttgccattgggcggttatgtcaaaatagccggcatgattgatgagtcgatggataccgaacagatgaaacaacccgaacaaccgtgggagttccgctccaagccggcgtggcaacgtctgctgataatggtgggtggcgtactgttcaacttcctgttggcactgttcatctactccatgattctttttgcatggggcgaccaatatataaaggtacaggaagcccctcttggtatggaattcaacgagactgccaaagcggtaggtttccaggacggtgatatcctcctttctgccgacggtgttcctttcgaacgttatgacggcgacatgttgagccagattgccgatgcacgcgaagtaagcgtcatccgtaacggggcaaaagcctccgtctatatcccggaagacctgatgcaacgtctcttggcagacagcgtccgcttcgcctcctaccgtttcccgtatgttatagacagcgtaatggtgaactctcctgccgcacaagcaggaatccaggcaggtgacagcatcatcgccctgaacggaaccccgatctctttctccgacttcaaagaagcgatggcagaacgtaagaaaaacgaagcaaccctgctcaaagacagcatagatccgcgtctaatcacgctgacttatgtgcgtaacggtgcaacagacacgctaagtatgcgtgtagactccgcctacctgatgggtgtaaccgcctgtctcgtcacagaccgtctgctccctatggtaaaaaaagaatatgctttctttgaatccttccccgcaggtgtctccctcggtgtgaaaaccctgaaaggctatgtaggaaacatgaaatacctcttctcaaaagaaggagccaaacaactgggcggcttcggaacgatcggcagcatcttccccgctacctgggactggcaccagttctggtatatgacagccttcctttccatcatcctggctttcatgaacatcctccctatccccgcattagacggtggccacgtgctcttcctcttctacgagatgatagcccgccgcaaaccgagcgacaagtttatggaatacgcccagatgaccggtatgattctgctcttcggtctgttgatatgggctaacttcaatgatattttgcgattcttcttctagcgaatataacaatagaaagatagagaaaacatataaaaagaattatcccggatgaaaaaggttttaaaaaccaattttcatccgggatctttttttattgttgtttgtctttaaatcttcaacatcttcttctctctctccaaatccgtctcatccaacttaggcgaaggcaccgtgcacgttttgatataatctccctcctgacacgtataattatagtacacctccaattccggagtcaattccacccgcggaaccagacacccttccatctccagaaactgattaacatccgtactatccgactgtttcaccagtacaatacgacgcgcaatcggattatgattgtagtccagacagagataaagccctttcagcatattcggaaactcataatgcggaagttgcaggtaaatagtcaccagcgcaaactgtggcaaatccctttcgttgaacatcaggtaagagttctgatgattactgataatcccgctcccccaatgcaccgacttatacgcattaatcatccccaccttcacatactcattattctcggaagcacaaatcatgtacggctcgatcttcaagctatccgtagaagacgacaaactgtaactaagatacataccgctataattatacacctcctgcatagactccttcgcctctttccccagcaacttgataaaagagttgccattctccgcctcgctctgcacgtccggctccatctcctgaagcaacagcctcaccgatcccacattatttaataagcgtttcttggaaacattattcaccagtgccaaagcttcatccagcgcctcgtccggtgtgcgtgttttcaataagtcgatataagcgggaagcacactcgaatacaaagcagacaacacactcggagccatatccacccggtcggcaatttctttcatcttcaccccgttgttgcgcaggtactctattcttttataaatatccgtaagttcgtccatgatttttcggtttgttaattgattccgttgcaaaggaatgactaaggtattatgtttgtattgcatgaatattacattaatatttcagtacacttaaaggctcatatatacaatatgattcattgaaattcattttttcgttcgctccgacaccctacttttgcaccggaaacaaaaaaatagcattatgaatttcaaagaaaaactgtcgccttcggcccaaaagaaactttccgatttactctttatcctttatgcgggaggagcggcactgctatcctattcattagtctacgcactacgcaaaccgttcaccgccgccacgttcgacggcatggaactatttggtatggactataagatagccaccagcatcatccagatattcggatatatggtatccaagtttatcgggatcaaacttatttccgaactgaagagagaaggccgcctgaaattcattcttgtttctattttagtggccgaactctctttggttcttttcggatgcctgccccgcccgttcaatgtgttggcgttgttcttcaacggactgtcgcttggctgtatgtggggagtcatcttcagcttcctcgaaggacgccgggtgacggatctgctcgcttcccttttcggactcagtatcgcagtcagtagcggcacagccaaatccatcggacttttcgttgtcgacaccctgcacgtcagtgagttctggatgcctgctctgatcggtgcggtagcattacccttgctggcaggactgggctatatcctcgatcacctgcccaaaccgactgccgaagacaaagcactgcgtgtggaacgtgtcactctcaacaaacaacaacgctggaacctgttccgcagctttgctcccatattgacactgcttttcttcgccaacctctttctcaccattttgcaagatgtcaaggaagactttctggtgaaaatcatagacgtcaatgccgccggactttccccgtgggtattcgccaaagtggacggtgtagtcacactgattatcctggctatttttgccaccctggcagtgatgaaaagccacatcaaagtactttccgttctattgacccttgtcattgcgggagcaatcacacttagcactgtggcattcaactaccataccctgcaactttctccgctcgtgtggttatttatccagagcctctgcctctatttttcctacttgagctttcaaaccattttcttcgaccgcttcatcgcctgtttccgcatcaagggaaatgtaggtttcttcatagcgatggtcgattccatcggctacacaggcacagtggtggtattggtagtgaaagaatgtttcaacccggatttgaattggctggaattctacaatacgatggcagggacagtaggaatcgtctgcacctttgcgttcaccttagcaatgatttatctgacacaaaaatacagaaaagggaaacagggtgaaatacgcgggaacgaatcttgccccgtcccctccctcgcttcttactaatttctgacgaataaaccaatattatatagaaacaagaatgaaaaagattgaatgtattattatggactgggctggtacagccgttgactatggatgttttgcccccgtggctgcttttatcgaagcatttgccgaaaaaggactggtaatcgatgttgtacagacccgcaaaccaatgggactacccaagattcaacacatccgcgaactactttccatgcctgacgtgaacgaacagttcaccgcccgttaccaacgcgcctggacggaagaagacgtggtagaactaaaccgccttttcgagaagcatctcttcgcctctctcgaaaactacacagaccctattccgggagtaatcccaactttggaaaaattgcgtgccgcaggtattaaaataggatcgaccaccggctatacccgcgaaatgatggatgtagttctccccgccgcacaggcaaaaggataccacgtggattattgcgccactcccaacctacttcccgccggacgtcccgctccttacatgatttttgagaacctgacgaaattagcagtccccagcctcgacgccgttataaaagtgggtgatacgattgccgatattctcgaaggagtgaacgcgaaagtgtatagtgtaggcgtgattctcggcagcaatgaaatggcacttaccgaagcagaaacaaaatcaatgcctgcctccgaactcgaagcccgcatcgccgatgtcaaagagcgcatgcttgccgcaggagcttcttacgtgatacgcactatcgaagaacttcccgcactgattgaaacgatcaacgccggcaactaacattcaagcccgcacccaacaatcagaaaagaaacaaaatcatttatttattcatttctaaagaaaacatcattatgaaaccatatttgttattaactccgggacctctaaccacctctgaaacagtaaaagaagccatgatgaccgactggtgtacatgggacgaagactacaacctcggcattgttcaggaactccgcaaagacctggttaacatcgccactaaaaaaccggaagaatacacttccatccttttacagggaagcggaacctattgcgtggaggccgttttaggcgccaccatcaccccgaaagacaaactcctgatttgtagcaacggagcctatggcgaccgtatgggcaacattgcagaatattaccatctcgactacgacatgctggcttttgaagaaacagagcaggtatcagttgaatatgtagacgattatcttagcaataactccgatatcacacatgtcgctttcgttcattgcgaaacaacgaccggtatcctgaatccgatcaaagaactgtcccacatcgtcaagatgcatggtaaaaagctgattgtagactgtatgagcagcttcggaggtatccccttagatgtaaacgaactcggtatcgacttcctaatcagcagttccaacaagtgtattcagggtgtaccgggattcggattcatcatcgcccgccgttcggaattaaaatattgcaaaggagtggcacgctctctttccctggacatctacgaccaatgggaaacaatggaaaaaggacacggaaaatggcgcttcacttcaccgacacacgttgtccgtgctttcaaacaagccctgaccgaattgattgaagaaggaggtgtagaagcacgttaccaacgttattgcgaaaatcaccgtattttggtggaaggaatgcgtgcactcggattcaaaacactgctcgaagatgacatccagtcgcctatcatcacttctttcctttatccgcatgaaggattcgacttcaaaacattctattatgcactgaaaaataaaggattcgtgatttacccgggaaagatttcaaaagcagataccttccgtatcggaaacatcggtgatgtgcatccggaagacttccgccgtctggtagaagtcatacgggaaacgaaatactagaaagtcaaatctttcaagttcatcttgaatgattgcttactgatatgttgtatgatgttcctgtgaagttctgaaagacttaatcctctttcaggacttcattattttcttttcagggtggaaggctgtgatagcctcaagctactgacgatagctgccacaacggcaaacccactccccaccatcaggcaaacagccgtgctccggctatgagtgacaaagctgaaaagcaaggcaaccaatgttgttccggtggtctgtcccaacaggcgggccattcccagcatcccactggcccctcccgaacgctgcgtaggagcggaagagataatcgtgctattgttcggcgtctgaaacaatccgaagcccgcaccacacaacatcaaacgcaggatgatacttatatcagatgattcggcagtcagactggaaagcgagaaaagcccgatggcaaacaaaaccatcccgatacttcccagtataccggggtgaatacgctccacgagataccctgccaatggagccgtgaccagcgtagccaacggccacggagtaagcaaaagtccggtcatcacctcactgtgtcctaaagtgttctgcaggaaaaaaggcagggaaaccattgccgacatttgagcgataaaggaacaaatggaagtcaggatggataaccggaaaatcggaatccgcaacaggtcgagcggcaatagaggagtagtctgcgtgagttgccggcgcacatagtacgtgcctaccactgccaatacaaccagttggatgaaaaggaaatccatttcctcgtgatgggcgaatccgtccagcgtatatataagcaggccgaaggtaaccgcattcgctatggcactgatataatcgaatttgcgtttcgagcgttcctcctgccttggcagatgtttgatgccgagaaacaatgcggtaagtcctaacggaacattaatagcaaataaccagtgccagctggcaatagaaagaataccgctcgccacagaaggcccggcggcagccgatatggcaacgaccatcgcattaatccccattccccgcccaatctggctcttcggatagatgtaacgtagctgtgccgtattcacgctggtgatggcagaggcactgaacccctgaaaaatacgggcgacggttagcgtccaaaacgaatcggacaaggcacagatcaatgaagtgatgcaaaacaggccgatacccgaaagaaagactttccggtaaccgatgatttcacccaaagcggaaaaagacagtagcgatatgacgatggccagctgatagccgttgataatccaggtggttacagcgggagaagtcccaaaatcatgcgaaagcgtgggtagtacgatattgacgatgttaatatccaataccgacatacaaagagcgaatccaacggacaccaccgcccaaatacgcttaggcatcggcaatccgtcggtttcctctattttttgagttgaatttatcgattgtaccataaaaacttattcttgtaagtagtcattcttttttcaccataaagcaacgcagggatgcaaacacaaacaccaccgactacaaaaaaagcaccgcgttactccgtgatgaaaaatgattcacttggtttcgtaaaggtaaacaaaacaatggtacaggtgtttttgtttcctttgaaaaataagtttttttagtggagaaaagtcgttacttcaacttcaagatccgttgattactgcttcccctgaactccagatacggagagaaaagagcctgctcgaagcgtccgtccaccaacacatctatataatcaagagcagcactcaagcggggctgtgccttgatttcttcgtagctatatcctgtatagcaccacacattcatccccgtctcctctttcacccgtttcagtaaaagcagaaactcctccggatggaagaacggatcaccaccggaaaaagtaacaccgtccagcaaaggatttgccttgatttcacggatgatggactgtattttttcttccgtcaactcttcccccgccctcggattccagctctccgggttgtggcaaccaggacagtgatgggaacatccggcaagataaatagagtaccggatgccttcaccatcgacaatcgtttcaggataagttcctaataaattcacttctacaggtgttttacgcggtcttgttcttctgcccgtttagcagagttccaggaactcaaatcgcctgtcaggtaaccggttatacggcgcatacgaaggatgctttcactctggcacaccggacatttatcgaagataacccctttgtaaccacagttatgacaagtatctaccgggtgattgatagagccgtagccaatcccctcgtcgtgcatcactttcacaatcttggcgatggcacgtacattcttctgtgcttcaccgtccagttctacatacgtgatatgtccgccgcgcgtaatagcgtggaacggagcttcacgcttgattttctcaacgatgctgatcggttctttcacgtctacgtgaaaagagttgacataatagtcgcggtctgtcactccggggatttttccatatttccgacgatccattttagtgaaacgtcccgaaagtccttcggcaggagtagccagaacggagtagttcaggttatatttctctttatattcgtttaccactttattcatttccatcaccgcttcatacagcgtgtcccatgctttctggttgtggccgtgaccttgtccgtagagagccaccatcgcgttgtgtccgccgataaatccgatacccagcgtaccgctgcgcaatgcatcacccacctgttcattcgggttcagctcaccgccgcctttccacacattatttcccatcatgaacgggaactgacgtgccagggccgtacgctgatactgataacgctcgtaaagctgatcggctacaagcacggacatttggtgtacggattcgatgaaaatttcttttgccttctgttcaatggcatccttgttgcgttcatcctctatcaggttttccgccttgatgcgggcttcaatcgccagtctcggcatattcagcgtagtgaatgaaagattgccacgacctaaagaagatttttctcctgccacgttttcaaagacacgggtgcgacaacccatcgtcgccaattcgtagatgtaacgtttcggatcgtccgctctccatttctcgttctgattgaaaggtgcgtcgaggaacatgaagttcgggaacaatgctttcgccgtagtctggcaagcctttaataacaagtcgaaattaggcgcctcgtaacggtcggtcattgcctcttcgatattttccgctttcattgctttctcaaagtctttttccgagtaagaaactccgtctttcaccttgaaaatctggatcgggaatacaggcacctcacctcttgtacccaatccttcaatggtagctttcagcaattcttcgatcaccatgcggccttcggcagaagtgtccgtaccgtaattgatggagctgaataccacctgattaccgccacgtgaatgcatcgtgttcaggttgtggataaatccttccatggcctgatgggtatctttgcgagtctgctgataagctttctcaacgatacgggcaaggtgttccttatctataataatctgtaaagccaccaaagcaatgcgcaatgtttcgcgttcggcttcagtagtcttgatagacggaagatattcattaatcaatgtgcggatggatttctcatcggcctgatttccgttttccatggcgacatagaaattgatgaacgatgccagatgcttgcggaaagatttggccacaccttttgccatgaagaaatcgaaagcaggaattgcctgtccgccatgctgctcattctgattcgtctggaaaataatggtagccaacgtagcataactctggatgctttgcggggtacggatactaccgttcttggtgcgaaaaccacgttcaaagaggtcatccatatcatattggatacaggtcgtcgtctttgtcggataataatccaagtcgtgaatgtgaatatctcccaactggtgtgcttcggcaaaacgtttcggcaacagatatttatacgtataatctttggttacttcggaagcgaacgtcatcatctgtccggcaggcgtgtgactgctcatgttggcattgctcaagttgacatcgttcttgtcgatagcaacgatgccgtccatcacttgcttcatctgggttttcttatcgcgctctgtattccgccattcgcgataaataatatatttcttcgctacttccgggcgtactttcatcaacgacttttctactaaatcctgaatctcttctacggtaatagtaggagtagtaaactgactgattacgttcatagtgatgtcagccaccaactgctgctcatcctgaatacctgttgcactgaatgctttactaattgcattcttgatcttactgatagagaaatcttctctcttaccatcacgtttgatgatacaaatttccgcgtagttcataactttaactcccgaaagtttaaatttaaaatattgataactaaaagaaaaagttccggcaggtcttctgacttatccctccctcgcaacaccttcccacaccgacatcgatgcagtggcttattgtgcggattcttagagaattacagcagcgggtactgtcgccgatttacacagcgttccctcattgactaaacctcttttagctccgaaaccggatacaaagatagaagataatctaatagcttggttagcttttaacattaaatttcgggaaacatttctttctcgctgatacagaaagttttccaaaacggaaaacttttttctgattttaacgtggataatattccaatttcgtttatttcacccaaaagacatatatagtttttagctacttcactcttagcgaaaaaagaatgtgttaaaagtctccacaactatcttttgcttcataagttacagactatttttcactttcgaccaaacctttctttccgataaaatgaaagaaattataatttttcgatttcttctttcgaaagcccggtagattttatgataatatcgtcagccactcctaattctttcaaattacgagctgtttcttctttacctttctgcaaacctttttgcaagcctttctgttcagcaaagtccaatgtattaaaataatcgttataaactttccattcttcttcataccgggctctttcctcctgggtcatatttgctttggaagccaacttttcaagtcgctcgaagacggccttgcgagccttgaaaggcatccggtcaagtgtatccatatgctttagtatataaatccagcgttcaaaatcattttcacattcatcctcctctttgttgaagttcggcagttcgataaaaatctgccggaacttgttgctgaagagcttccccgtatccctgtcagaaagaacgatatccgttctgattttagagggcatatccttgtccatcacgaaattcatgaagaacactccgtacacggcatccaattgaaagttccaaactccccttttcgcctgctgcgtaatggccctagaaagatagaagagggcacgatctttaaagtaaggctgttcccggttctgcatttctacgataatacgttcaccggtatcggttacgcaatagatgtcgtagataagacctcgttctgtttttacttccggctgctgttcactgttaaggaactgaatgtcggtaatcacatgctctcctacgagcaaatcgttcaagaagtcgattaacaactccttttctacctctctgccgaataaaaacttaaagccaaaatcggtaaagggattgataaatcttcccattatatgctgtgtctcaattacaaaacaaagatagagtttttttgttgaatacggtcaagaatagaaaaaaataaatgggtacaaaaaaagaagctgcctcattcatcgggagacagcttcttcatttgaaccttgagccttactttactttcactttatgagttgctccacgtttgttaccggttccgtgagctatgtgcgggcggcacgtttcgttttttttcaggatcatttttttacacgtacactaatctttttccgtcttactgcttctccgatgacggaaccgcagaacagcctcaagaatgtctaacaacttttccagtaataatttcattcgcttttctattaaggttgataatctattttatatcggtcgaagtgcaaccatcagctatacccgattcgcggctactgataagtctatcaataagctttagtttgcctgacaaacttatcagttaatccctacggattcagctgccagctgcacttccggtcaagcggccgggtccggcgcttctcctcctccgccaccgggttcgtcgccgtcatccgggtctttgtcaacgacatcgtcggccacaaacgaacccgctacatccttgatgtgcacaaactccactccggtggtcaatgcgcgggtagcacttccgttagcggcacgggtgtattcaggggtaaactgacaacgcaatgaagtgatctgcgaactgctgactttactctccaactccactccttttcctcctgctttggcaatcattgtaaatgttcccaagccttcgagacgcaccgtgcggctgttgagcaactgttcgcgcatcaccgacatcaggttacgaatcacgttatgaacatcacccgccgtcagcgaggctttttctgcaatcaattccgccattttctgcgtattgaccattttcccgaatttcaccagacggggataataaagtttctgtccttccttgttggcaagtgttgcctgataaggtttgtaaattaatggcatactgttttcctttcttttttgattgatgaataaataactactgtttgtaaccgattacgaagacaaaagtacacgaagagaaaaaagcagggaaacacgatgttacaacccgtcgcaagagagaacagacaagcacaaattgacacgattcatgcctgcaaaggcttctgtacaacacagaaccaaccagcataaaaaggcgtacctttgcatgagttcataaataaacctctaaaaaacagtcaatatgaaaacagaaacaaccccaaaagcagaaacagagagccgtacccgcatacaagcctatagcaaaagccagttggccggactttacctacctcacatacagtccgcctcggcacgacgcaccctccgtagttggattgccaagaacactgcactgcaagccgcactcgctcaaaccggatatagtgaaaaagccatcctgctcactccggcacaagtaaggctgttcttcaagtttttaggagagccctgaaacgactcttttacaagggaaatatcattcggagaaagacaaagccaaacaaggcaagaaaaaaggcaagccaaagcaaagcggacatttcatcacagatcacgcgaatcaaattataacttgctgattgctgttataaagagtccaagataatctgtaacgaactgtccgctcattatataaaaaaaggattatatcattccggagtaccttctcccgacggcttcatcaaatcggctgtaacctccgctttaaaacggacaccgtcgtgaagccgcagattcaatttgacagtaacattctcatcgttgttacgcttcacataaaacgttcccgtcacccttttatattgggaataataatagaacggatcttcgtaaataaagaaatactggtcgttttggtacaaggtcgatgcatccaccacttgcccctcccaatacatacccagagaaaacaaaaaataagtactagttttcccgtcctgtatcttttccggagaaaagatacaagtaaaataaccaccgtctatagtagcctcaccggacacgatcctgttcgcttccccccggaatgaataagtaccgatggaaggcaattcctccacatccggaccgggatttaccggatcattatctttatcgtcactacatccggcaaaacccaccagaagcaatcccgataaaacatataaatttaaatatttcaataagattttcttcatgaatacacttcattaaatcgtcactctattactgtcaccgcacctttatagtagccggacaaactggcatcgccatatttcttaatacctaccacttcaaaagtcatttcaacttcattgccctgaagagacaccgaagtccggcctcccagagccagattgcccaatgtggtattagcccgactgtaagtcactccttcatacgtaatcgagattttcacattttcatcatcaccggagaatccgcggagcactccatccagcattgttttcgaaagacgcaccactgcatccgctgccgacattcccgccacagtagtgatacctggctgtcgtgaaaggtaaataacacaaatatccgcatccgtcttatctatcaccacagactggatagtgaccggagtaccgtccgcccctaagcgatattcattcgggatcgtcgtatcatacaccacgaaagcaccgttatagttacctgatattttaaggctattatcacccaaatatttgaggttaagcgtcaatgaatattcattatccgctgatttcgatacactgaacgtacctgccgcatcctccaggtgacctttggatatttgtattctttcttcgtcatacgggctataataagtaaattcaaaagccagattggtatttgttatatccacttcctgcccgttaagtcctgcgttcgggacaaagagacgcacataatatgtgtttacattctccaagtccgcagcagacgaaattctcgacggagtgagatacaatgccactccttcatccgtcttttcatagaaagtagctttgatgtcacgcgtgttttctccgttcaacgttaatatattcgtcgtactctgtttaatttcagaataagcaccctcgtaagaaccttcgaactttccacccgaaagcaaagtaaagctgaaagttattttcacccgattatccgtcttttccactttgaacttacctgccgaacatatttcagaccatccataaggatctaccgcagtcaggtcgtcagctcccaattctgtcatattatagaaagcataatccataccgtcataagacgtgatatccaatacctgtcccaacatagcgggattgattccgatcatcaggaactccgtatccgacatatcttccaccgttgtcagtcctgcgtacggactaagataaaaatattgaattcccccgatgacagtagccaccaccgatttcaacggacgcacttcacttccgaaagaaaattcactgggcaactttgcaggagccttgtagctacaaccagcctcccctgtaaacttaccgccacttttcagcgtacaatcaaaagtagctttcacagccgatatctcattctcacccggagtcatcgtcaaagtgatcttgccttgcgtcagcacctcttcccattcgtaagggtccacggctacaatagcctcaccatcggcatccatgtaataaagcacataatcgtcaccttcagagctgcctaccgtaaccggactgcccaccagactcttatccactcccagcatcacatattcctttccgctattcataaagtcttcaagcgtttccaaactctgcaacggactcatacacacatacacaatgccatcctgttcaaaacaagacaccgatttagcttgtatcgtcttatccttatacgtatacgtattcactgtttccacaggttccagttccggctccggttcgggatcagtggccggatcatcgtcactacatgccacaaaacaactcattgccaacatgaataagaaaaaggaaataaatctagttttcatatttctcgttttttgggttaattataaaatcgcgttattagtaaaatgatgccatccacccgtgtttactgcggacgataatcaaatacggtaataggagcatcctgcgaataagtggtacgtacatgattcgggtgttccttatcacagtcaataaaatctatcgtcagcgtgtgtttgtcaccgtcgcgtgccacagtcatggttccgccgtctatgcgtgcatattctttcatggctccgttctgaagtttctcataccaggttcctcccggataagtaaagccgttaggatagcccgaagctatgtttcccggtttcagcaactcgcgcgggataccatatgattccttatcacgcgccaccaccgtataagtacctgccggaataccctgtgttacatccgtagcccattccacgaaaaattccaccttcaatactcttccattaccggccggccaagtgtcgacaagacttatactctcttccgccagataaagctcgactacccggcacgactcatcttgcagataataagaatcgcccttatcctgcaggcgggcttgcgtccatccattcagtgcaatatcggtggtcagcgtagaattaggagtttcatccttgctttcgtgacggtcgatggtgattacttttcccgtataggtgaaataacgtttcaaggaaagatcgcccaccaatgttccgctaatcgaatattcaccaccggacagccgtttcaccgtcattttaccaccggaaagcaaatcggcatcgacactcgtagagtaagatttcacatcaccgtagaaagttccggcaggaatatccacctttccggtcgggagatcgatttgattcatatatccgaggttgaatgtccattcatcaaacgtgtatccgttcaatgctgcatcaaaagtgccttcagggagcggaaattccgtagcttccgaagcaaatggcgggacattcaggctgaacgccatgatcttgcccggtcctatcggattaccagtagcatctacttccatatccgtataaagcgtcaatacaaaatgatctgtgcccactccgtctttatctccccagtacaccaggttggagttgacaaactccaccacttccggcgccgggtttacgtcttctccaccgggttttcctccctccggattttcggcgtcattgtcactgcaagcggtcaacacccccacagacgcaacagcgaacaggcagacacccaataacttcattattttcttatccatatcagactgatttatatattttacatcattgaaaagaacttccgtagcgaccgggaatcataaaaaaggcggagtaagctcgggaaaaggattcccattcttcgcacgagtatccccgcctgtcatatagtaaagttaaattaagagagaattagtaaattctcattccgtttcacaacggtagttcttttctttattcatcaatgttatgttcgttttatctgaaaagtgcaatatccgggaaaaggatacaatctttcagtgtcccggtcaggaactgctgtccgtcaaacaatgctatcgccaggtagcatccgctttccggtgctccggtcacgtcctgaaaactgactccgacagaaccgtcctgataaagcacaggagcgaaaccgaaatttcctttcgaataaatattggaagaagccgctacagaaaagccgtacagggtttgcaaaacaacacctgccccatcatccgatgttccgtccgatactccacctgacgttccgtccgaagcgccttctgccacctcatccgcaacttcttccacgaccgtaaagtctttctgtgccgcaccgataggaaccacaaacgatccattttcataggtagcctgcaatgaaatcgtagcctttgcggggtctttcagatattgcgctgccggagtatttgccaacgacatcttaatggtatatccctcgccatcgacattcttcgaaatttcagtagccgacaagggataggcgttttcgatattcttcgtatcccatttcacataaatccggctatttccccacactccaagcaggtccgtcgcttcatactggtagacgtagtaaaagaacttccgcccttcattggtgctgaccaacaactggcaggcacggggattaccggttttgttctctttcaacacaagcaagaaaccatcttcttttgaagcagccggcacctccacccagtcgattccccgctgcacgctcactttgaaatcaaacgaactattcacccgtacaatcgtctgtgaaggagcatttccgaggcgtatcacctgctggtcggagtcgggagcaaaaatatttccctcctgcgtcactacaattttctgttcgctattgccatcgctcacggtcacctgcgtggcacgtgacgtatattcataattggctctgacaagcaaagttatcttttcgtttgtcacttcgattaccctgcaccagtccgcacccgaaacggcagttagttctccggtagcctgcaaagccacttccactgttccgcctccggctaccagatcgacgtccgccttcatgacgcgaaagccttgtgccgtttcatcgttttccttgtcgcacgctgtcatcagcaaacagcacgcagataataacagtataactaacttattcatcatatcattcttctattgtttttttaatcaacctgattgctgcaactgcatccgtgtatcccatgaaagaggcctcctcatcctgcgagtcgtacacaccgaagataaatccggagatttcacccatccacactccattgtccaccagataaatgccgtcggtggtaggataactgataagaccgattgccgaactgcgcaaaacataatcattcatcaaatcccacatagccagatatacgtaacctccctgtactttcttcaagaattgcggcaggatggaaagtccgccacgcggcttgtcgtaagttaccagaatgtcatattcgagtcctttaagccagtagctcttgccgtcctcgttcttcaccagttgaatctcctgcgaagccacttccagttggttcgtcgcaccgttcaggcggtagaaatccatcaaataagtgcccggataatagtcgtagctctgatatccgtcaatgtagatgcctttcatcttcactcctgtagctccttcgtcggtacagacaaagctgatttcctcgttcttccagacaaaattctgcatggtttgtccgtctatcgtcaccggttcgtgaaaacgcattccgtcggtggtaaacataaaaggtacggttttctgatacacctttccaacttcgtcataataggtcacaatgaacgtatagttgctgcgtagcatttgcccggtgtagagtccgtccatccgcaggtcgtattcataaaagaaagcatcgtcttccactttctttatccgggtgagatattgcttccacgtctggtcggcagaaaaagccttcatcacgatgcggttgccatatttcttgcctttcagttcgatacggtcggcggtggcatcggagatcacaaattcgtagtcgcctccgagcgttccgttcgggtcgtcggccatacttccctgcggttgcccgaaataatgcaccaggtaattgtaggtatcgaaagacaacatcgtcgcctgctcggacttgacgctataaagcgaactgaccgtctcatccgctcccgctatctgcgaagccatcgtcacccgctggccgtcgaacttgcaaagcagggtaatacctcccagcgagtagtccttaccgacgtaatattccatcacccatccgttgggtgctgcttccagcagttcgctgcaacgcttcacatcggccgtggcacggttggcagacgaatcgtcaaaataatcttcttcctgaaagaggcacgactgcaaacccaggcagacaagggccaacaggaaatatatcgttctatttttcttcatcataataatgtgtaattaaataatcatccaatcgtcaatcaaaaaaacaagaggtgaccggcacttattgaatagtgctcaagtcaatttcggtaatctcctgctggcggcgcagcacgattttacgaagttcgttgaggtcgatcccccatgtgtcgcgcatatagttatagacaatcgtgaatttcttgttgatgatggcagcgcccgattctccggctgccgtcatcatattgtcccagtaggcctgcgtatgcgtgacgtacatggctatattttccacaaaatcctcgttggactggctcatggcataagccgtcacgaaaccgtcggaccaggccacatcgtccgtgcggggcatggcaccctgggcggtcatgtagtaataccagtcggctcccacgtattttccttccgagatgcggttgaaagaagggtcgaaattccgtttctgatgcaggatatgggcaaattcatgatgcatcgtttcaaaataatactcgttgagcttttcgatattgatcttctttatgttgaggtcgttcacgttgtagagggtgattttcttcccgccttctgccgtgccgagcaccatgttaccgctactttcgtaggcgggcgatccgatgaggtggaatgtcttgggtacgtagacacggagaaaatccattcctgccagttcgacgtaagcgtccatccagacgtgtttgatgattttcgacagtgccactgctttgtcatagtcggcgggcacgaggttgtatttatgatcgctctcgatatccttcatgcggtacatgaagtcgatgttataaggataggtgtagttgtcgagcagccagtagtcgaaagcatttctctccagcggttcggtagagaagatgctgttcgcagtgtctatctcgtcgttattgttgcaagcccccaggcagactgtggtgagagcaagcaaagagtaaatgatctgtttcttcataattttcacttttttctctgttagtttcttctcgggttaggttgcattcccgccacgatcacgtttcgcggaatctggatggcacggcgcaggtcgttcggcggcatttcgtcggtgacacgttgagtagccatgttacgacggtaaatcataataccgtaccgtttgatatcgggccagcgcatcccctcgtgcagggtagtgacacggcgtatgtgcagaatacagtgaagaatattttcctgcatcccttcttcgatagtgaaatcgggagctagctgtttcttgggcgtctgttgcgtgaaaggcgtgtagaaattcattttatcataatacgcattgatctggtcgggtgtcagggtcgatttgttgcgggtgtaggcacgttgccagctcgtgatgtcggcagccgactgggggtacattttcttcaacgcgtatgcttcggcacggcaaagcagggtttcgtccgttgagaacaataccggcatataataaaggtagccgccatcataaagtccgctcttgcgcaggatgctggctacaaatccggtggtagagaaaggtttcagatacaaataatccgagctgccccacagtcctgcagaaagacaggtttcgctggtggcgagcgtttggttgtggaagtaacgcgggcctaccaggtagtcgcttccgagtgcgccccagttggagacggtgctgcttatcagcaggttggcctcattggaagaagcaatatacgcatctgcctgcacatttccgttcacggaaagattgctcaatgcttcccagtcgcggagcaggtcgtcggggttgctgcccaacacacgggtggcaaagtcaatcacccggtcgcagttggagaaatcgggtttcatataataaaggtagaaacgggcggcaaaggcataggcggccttgcgggtgaaatggtatttggggacggaatatccgtcgtccgaaatcagttccactccctccaggaggtcacgctccactttccggtacacttcttccagcgtgctgcgctcgtaacggggagacacggtggtttccacgtcttccatataggggattcccaacgattcggaggcatgagtgtcataagcattgcagaagatagttgccagcatgaaatggcagtaggcacggcacaccagtgcttcaccgcgctgcgggttgagcgatgccggatttcctttctcctctatcgccttgagtgccatgttggcggctgaaattgcaccgtaataacctccccaaagggaattgggtgtgtcctgatattcctctttggtatcttcccagttgtaacattccttttcggaaagctggtagtaaccgtaggtggggccgctatcatcggagttgtcgctgtagagttcgaacagttcgttgggtgatacgtcgggataggccgatacaagcagtttggctattttctggtcggtgttcagttccgtgcggttgtccggtgttttgtccagaaaatcattgcaggaaacggtagtcagaccggaagctgcggtgagcagcagcacagggagtatatggtttattttcgtcttcatctatcgtatattttttcgggttctctattgggggttacaatcacagtcccagacgcagggtgagggtaaactgacgcggaacgggggatgctacccctccggtgttcacaaattcggggtcctgcccgttcaacttcttgtcggcgtagatcaggaagaggttggtagcctgcaacttgagcgacaggttggatattttggcaggagcgatccagcttctcgggaactcatacatcagtgatatttctttcatgcggataaaatcgcctttggcgatgcgctccgtagaatagttgtaggcgttgtaggcaagataaagcgatgtattcgtcctatattgcgggtcgctaagtatcaccgggatattcgttctcgcttcgtcgccggaaacagtccagcggtttttgaattcacgcggcatggcggtaaggtcggaatatttgtagttgaacaccgggttgaggcggactacgttgccgaaagagtaagtcataaagacatttagtttgaagcctttataggtgaatacattaccgaaacttcccgtgacggtgggatcggtaggaccttcgtatttcaggtaatccagtttttcgcgttcctggaagttgatgctggtgctagtcacttttccgtcgatgaggtattgcggaataccgtcttcatcaagtcccgcaaaagggatggagaagagtccgcgcacggggtatccttcgcgggcaaagccgttgccggaaacgagttccatcatacttgtgagtcctttcagctgggtgacttcgttcttggcataggagaagataaagtctgtgttccatgaaaaatcattcgtgcggatgttgcgggtggagagcgtaaattccacaccgtgagatttcatggtggctacgttggcatatttgttgatgacgccgcctactccctgtgtggggactacaccgatcaggtcgtagttgttacgctggtaccagacggcggagaagttgatgcgatattcgagcaggccgaggtcgatgccgatgttcagctcatgctttttctcgtaagtgagttcgctgttctcgatgtcatcgatataaagtcccgtttcctgaatgtcggtaaaggggcggtagggcgagaagctgcggatgatggcttgcgagttggtcacttccgccgggccgcggtcggcggtgagggagtatgaggctttcagtgtcaggttggaaagggtgggttgcagcgctttgaagaaagattcttcatgcacgttccaggcaccggacaggttccatgtgggtagccagcgggatgaacggctgcgtcccatgcggttggttccttcatagcggaaagtgccgttgagggtgtagcgtccgtcgtaagaatacgtggcgttgaagaagctggctatactccgggtttcggagtgtcccaggctgtaatagcgcgaaccggattcgataccgttcttgaagaactggtagatgtaggacggaatttcccccatcgaatattgcattccccagccttggaaagaggaatatgttttttgaaggctgttcacttccattccggcaaagaagttggtgatgtgcttttcggcgaaaagatgattccatgagagtgttccacggaaatcgagtcccagcatacggcggtcctgacgctggtagataccgccttcgggcagcagggtaataggcagggcgtatgggttgtcggggtcggtatagagcagtttgttttgctcgcggatggtggcgtcgtccataccggtgcggtaggcgattgcctgattggcgtcgtcgagcacgttgtgttcctgcgatgaagtctggtatctaacggctccgagggcactcaattcgagtccctgaatcactttccacttcatctcgccttgaaatttcacatcgaccatattgatttcgatgtagttattgtcgagttcgtggagaatattgaatggggcgtagttgctgatatagtccacagaggggtcgagtgtgcggcttgtgttgagcgcgtatgaataagggttgatgtcgaatccgcgggacatctttcctgatgcgatgtcgagggtggagttcatcgttcccggcgcgttctgctggcggtaggaggcgttggatatgaggttgagcgacagatttttatatatattataggttgtgttcacattggccgtatagcgtttcaccttgctctgcttgtaccaaccaggatcgagcatggcactcaaggaggcgtagaaagaggatttttccgttccggcggtgatgctgacggaatggttctgcgaaacggcattggtgaaaagcacgtcgaaccagtcagtgttgcgcatttccgcttcgcggaggtaagcgttacgggcttcggtggtgttgagcagtccgcgttggccgttactgttgttgtattcgtcgatgaggcggtacatacgaccgtacactccggtgtctctggtgcggaaaaggtcggcactgttcaaccagcctttctgttccatttctttgtagattcccatctgttcctgcgaattcatgatattgaattctttgtagctggggatagcacgggtggtgaactcgcccgtataactgatcttgctgactccggcacgtcctttcttagtggtgactacgataacgcctgccatcgcacgtgcaccgtaaatggaggttgccgaaccgtctttcaaaatttggaaactctcgatatcgtcggaattcagtccggctatggcggaactaatcagtgtctcggcatcaccggaggaaaggtcatcgggacctacgtcgatggcgtcttccagaatcacgccgtcaacaacccacaacggtttggaacttccgtaaatggaagtagctccacgcacacgaatcttgggggcagttccaaaagtgcccgaaacattctgaacggaaactcctgccgcacgaccttccagtccgcgactaatgtcgggcaaaccgtccagcttcacattatcggcatttaattgtttggtggctccggtaaaaagacgtttatccattttctgcataccggtcactaccacttcctgtaatacttcggaatcggatttcatcattaccttgatggtcccggacttgatgggaacatcctgcgacttcatgccgacataggtgatttgcaaagttcttgatgaactcatgcattttctgcccctccttccataagtgcttgagcacaaaatatttaataaatataaaaaagaaaataccgaaaggggaataaaaaaagcaaaaaaggaagtgaaacgcaaaataaatcgtccttttttgctttttatctacttactgaaaaggtagaaaatatctttcatgtagcaaacttcaagtccggcagcaactctcgtctccccaattagggtattaatataagagactatggatagaatttctttctttgtccaataaactatcttttttctacctgcaattatttatttgcagattattatgtgttattaaacatcttatctacgaatttatccacatttatttatcaaaaagatacttattttcgtttattaatcaccaaaaagaaataagaaaccgcctttcatgtacttatcttgtatttaagtccttttgctacaagtattttgtatcgacagcacaaattcatattttttttcatatttttctttgtttttctaaaaaagtggttacttttgcgaatcgtaagatagcaaaacagactattctactatataaaaactatatgaaaagaaaactaacgctgttattaacctgcctgctagcaggcattagcctggcaatcgctcaaacctccagaaaggtaatgggcgttgtcttctccgaggaagacaaccagcccgtcataggagcatccgttttagttaaaggtacatctataggaaccaccaccgacctcgatggaaagttcgttatcaataatgtaccaagttcatcaagaacttggtaactcccctcccgctttcttctattttccatcttttttcttcacctttccttccttttcaccagtctccaggaacagtgttttatcgtcatgaaactgaatatctatacgaatatgatgactatcatcaactgtatatcctacatccgcagaatctcctagaaaaagcttcagaatccagcacaacacctccggaatattgacaataatcgttgcctttccaatcacacaagagaaaaaattaaagatagttgtccaatttggtataggactccgaccgtcgaaattacacctgtacacacgccccacggacgaacgcgaacaatccgaattcttttcaacatatttttctggaatattattcagttgccccaacttaaaaacacaatcaattactttcttcttaacatcatcgtcgctgtgacgtacaccggtcatttctttctgaccattttcactgttaaaaaccacttctctttctaccttagtcatttttttacattttatttaatatttacatataaaattcacgacaaaagtacaatgcttattttaacatatatgttcaagcatgacacattctatatttttcatccatattttcacaaagaaagagggtttggggtacccattttctaccttaccggtattatcaagaaaatagatgaaataaaatctgccaaagaggaaagaaatcactcgttccaaaagctgtgatttgcgctaagaaaagataccggaactattactaaaaataataaattaagagaatagaaaagcgatgtcaaatcgcgactgtacatttatagcgggtaatatcaacttccggcaacttgctccctgaagcaattaccttagcaataaactcgttacattcctctgccgaaagcttcttccggcaaaaagcataatatagaaaatcaagagtagtcagaaaagttataccgttctgcaaacaatagtcctttatatccttcaaattactgctacccagcacatcacggtgctctctgcaataaatcatgcaggcactctcaccgtgtccaaacgttttaagtaattggaaataatctttcaacgatgctcccgtaggggagaaaccaaaataacatattcgtattcgggaaagatgtccggcaacaaagaaaatgcttccgctttcacaaaatggatgataacgtcagcatccagtattattttcgtcttcttctgttgcatgtgtgtttattttgcggagtaactcccaatagtgcccctctgatattttttcctgttcaaaaagtgagcgggctttttcgccgaagtctccgattaccagtccttcgtttgccggatcatataatgcagtgtcataaccgaaacacaaagccgagtgtttcaccggttcatctgccagcgcaagacgtgcagcattggtcagtaaaccaacattcagcaatctgtaaagcagtgcagagcgggaaacagaaaagtaatgttccaatttcaacactgttgccaatgagatcttttttgttttcagttcattttccgggataagttgacaaagtcctgtctccggcatcagcaaagaagaggcaaacatatcggcgctctgttctacggggtctttacttccactacaagggttgcatttgtgcggagttggtttactttcaatatacaagtgatagagttcgtgggcaatcgtgaaatgttgcctgcctcttgaatgggaagaattcacgagcatgaaccgatgtccggaaccgtctttgaggcacattcccgaaaagttatcggaaagagggcggaaaatggtcaagacattcaatttcagcaacagacttttcagattaatggcttccgaagcactcaatccgttatccgcgcgaaattccgccacttgtctttctatgatgaatttatttggagccatttccaatccgttccattttaaggtaagacttcacgagatctttaaaatgggctatttctttcaaatccccttcttcaacatcggagatacgaaaagcagtagccagaatctcattgtcggcttctacattatcttcaaacagaagaaacgcttcacagccaaacaaatcagcaatcttctctaacaaatgaaaaggcacttcacgaacaccgctttcatagttactataagccgaccgctccacaccgatagatttcgctacctgctcctgcgtaaaaccggataattctctggttttcttcaagttctctccgacaatctgattcatggttttcattagtcacctcctttattctgtggcaaaagtaattctaaaataaataataaacaagttttgccacagataagtttaatcttccgccatttactttttctcacatagcactcaatcatgactcaatcgtttcaacgtttcattatggttcaagcttggacagcctttgcattacctgctctctacctttgtccccataatcaaatcattaaaacgaatcaaaatgactgaaactgaaaaaaatcattccttccaacgggtacagctaatgaagcaagctgccgtcatccggcaaaacaacggtatgaaccggcacgatgcactcgtcacggctcaccggataggggctctcatccggcagatgcatcacggaaatgtctgtttccgctacaccaaacaggatggaaccatccgacacgccaccggcaccctcaccggatatgaacatagtttccaccgtccgtatctacccaaaccggaaaatacgttcgttgtctactatgatatcgaagccaaaggctggcgcacctttcacgctgaaaattttctggatatcgaaacggacgggcaagacagcaacaagtaaaaatgaatctgcaaaagaacggaatgaacgggcaggaacgaaaagaatgggaggcgctttgcagacagtataacgtagattcgctatacgaggccattcaaggctgccgggaagaactggagtttctgattcattgtgccgaacggctcgaacctcatacagaggaggaggaagaaacgccgtttaacacatacagaccacagcgtttctccgcaccagaaagcgccgtttaacagatggaggaaacgccgtttctccccgcatgattcagaaaaacgattattttttaacagagtataattttattaacattatcaatatcaagtatggaaaattggagatttattgaagaaaaccccgactatatgatttcagatcacggacgggtattgagtttcaagggcagatcaaagttgatcctttgtgccaaaatcatggggaccggttacgaaactgtcatactgccgaataaaggtgtttgtatcgaatacaaaattcatcgtttggttgccaaagcattcatccccaacccggagcagctgccacagattaaccacctcgatggcaatacgatgaacaaccacgtgtcaaacctcgaatggtgcgatgcatacaccaatatgatgcacgccatccggacgggattacgacgtacgggagtgggatctcatcaaacacctttcgccgttacggatgcaacggggaaagtattgcgtgcctacccgtctatgaaagaaatggtcagagaggaacgtctgaagcctgcgcaccgaaactggcttatcctccaactaaagcatccggaccgcgtgaaacaacacgccttgcgtgtgcaacatcatcggggagatgcttttattatggttcagacaaggcctaaccagaccacagtgcttaatcggacgacaatacctaatcggcccaccatgcctaatcaaacgacaacgccgccgatggatgctcccttctctccggtgctccattcagtaacaaagcaatattaccgccaactgtccaaagaggaggctattgcgttcggggttatctcacgtgccgtctgcaaacaggaaaggaggattctgccatgaaagacacgatcatcatccactgttccgccactcgtgcgggacaggattttaccgctaccgacatcgaccgctggcatcgtcaacgtggttttcgttctatcggttatcatttcgtcatccgtctcgacggtacgatagaaccgggaagagatgttgctctcgacggagcgcattgcacgggttggaaccatcggtctatcggcatctgctacattggcggattggacaggaacggccggcctgctgacacacggacggaagcgcaacgtgaagcactcgtccggctggtagaagatttgcgccttgtcttcccttctctgaagcaggtgatagggcatcgggacaccagtcctgacctcaatggagacggcattatctcacctgacgagtatataaaatcctgcccctgcttcgatgtaaaagcagaatttattcagtaataatcaaccatttacaaccagcattttatcatcatggcccgcatttccaaacccggattagattatttccccctcgatgtcaattttctgcaggacagaaaagtacgccgcatctcctgtcgccaccacgcggcagggattgccgcactcacttcgctgctctgcctcatctataaagaaaaaggttattatattttgtggaacaaagacactcttttcgacatcgcccaggaagcgtgttgcggggaggaggaaatgcaggccatcattgatgattgcctgtcagtggggctgttcgatgatcttatatataaggagtatggcgtactgacttcacaagcgattcaggaacaatatcataaaatcatcaccgacagtcggagaaaatataaattacctctggaacatttctggattatcaaggaggagagtagtgaaatagaaccggaaaatacggatgactccagtgccaactccggcaaagatgttacaaaaccccatgaatttgctacaacaatgccacaaacaaaagaagaaacggatacagatatcaaaggtaaacaggaaaggaatatggaaaatgaaatcaaatctgaaataaaaaaagacatagagacagagagggaaagaaaagacggaaaggagaatgagaggagcatgccgcccgttccgtcaaacagcgtttttcaggcttcgcctgtcgttgtagagggtttgtctttggataaatcgattggaaaagaaacggtttcggaagggatgcaagcgggaggaggctcggaagctatacttctacttaatatgcaaactatcggcatccggaacgaacagaccgtaaaagcgattgtcgcccttgcccgacgtaaagaattgggaggccccggcggtattttatggaaaattcttagttcccaataccgccctaccctactcaaaaagaatgaaccgggtgattacattctttgggcactcaatcatccgacggaatttgaaaacacctacaacgggacactgaaaaagctaatcaggggaagataaagcggaaaagtctgcctataaacaaggaacctttttatttttactgcaaaagggatggaaaaccaagaattatcgtacctttgtagtacgaagaaaaagcctcttttttatgtataaagagaaacgtctctttgcaaaacataaaaagaagcgacccaaaacaatgagtaaatttatcaatccgttcaccgactacggattcaaactaatattcggcagagaagtgtctaaggatttactaatcgaatttctgaacgacctgctcgaaggtgaacgagtgataacggacttacagtttttgaataatgagcaattgccgctctatccggaaggacgaggtattatctatgatgtatattgcaccacggacacaggcgaaaaaatcatcgttgaaatgcagaactgtatgcaaagcaacttcaaagaacgctcgatttattatttatcgcgtgccatcgtcaatcaaggaagggtaggcaatgaatggaagtttgaaataaaagccgtatacggagttttcttgatgaatttcattatcgacaagaacataaaactccgcacggatgttattctaagtgacagggaaacaggagaactcttctcggataagttccgggaaatctttatcgctctccctctcttcaacaaaaacgaagaggaatgcgaaacgaattttgaacgttggatttatatattaaataatatggaaactttaaaacgcatgccgttcaaggcacgaaaagctgtcttcgagaaattggaagatatcgctgatgtggcttctatgtctccggaagacagggagcgatacgacaatagcgtcaaagtgtaccgagattatttggtgacaatggatgcagctgaacaaaaaggtgcacaagaaacccagctgaaaatagcccggaacatgaaagccaaagggatagacaatgagtctatcgccgaatgtaccgatttacctttaagcataatcgaaggattataaagtaatcggattcataaaggcactatcttgtaaccaaccgtttacgaacgaagaaaataaaaagaggtgagctccctttgcagggtagtccacctctttctcttcatacacaaacattcaaattatcaggtttcaggtgttcgtcaatataacggataccgtccatcttaaaaagcccccgcagaagcgtatagttcaacatacgctgcaccaggtacggggtgccttgcaagctgctctggtagatgacctcctgcaaatccggtgcaaaacggtcgggatcgactccgggaagcagataaccgcaaatcttacaatgcgtcaaaacatcaatcaactgctgcaaccagaaagcttcctcccgctcgaaagcagcacggtattccctgtcggcagcaatatccatcagcaacttcttccccagcgaatgaagcagggtgagatagccatccactgtgataaaaagtgcctccatgcacgagctgtccatccgtatctgtttttgctggatccggcttctgattccgttggcaaaatcagaaagacagacacggaacagactcgttttgctgggaaagagcttgtagagtgtccgcttcgacatcttcattcccctggctatatcatccatcgtcaacccgtcggcaccatgctggtacatttcccgcttggtgtagtcgagtatccggcaacgcagtgtttctggattcatacatacctccctacatacggccgccacccaatgcctgatacaaagtgattacgccttggatttcggtaaagcggttcgccacttgtgacagttgcgcgttgagcaacgtctgttgggcggtcaatacttccagataagtggtgttgccatgtttcatcaacaggcttgtgctcttggctgctgtttgcagagaagccacctgcttgttgtagtagtcggctttctcgcgggcagtctggtactgcaccagtgcctcgttcacttccacgcctgcgttcagcaaggtctgttcgaaactaaggcgggcttcctcctgttgggctttcgctattttcagttgggcgatgttcgctcctttattaaacaaaggctgcgtcagggaagccacggcggaggccaggaacttacccgggttgacaatcatgctccctgcactgttggtccaccctgcgctgccgctcaacgtgatggaaggatagaaagcggcacgtgcggcattcgttgtatagaaagcctgtgccaacgaaaattctgcgctacgcacgtcaggacggttggcaagcatctgtaagggaacacccacggagaagttttccggcaactgttgatttcccagtttgccacgctgtatttggtggggagtttctgccagtaaaagtgccagtgaattttccgcctgattgatttgctctttcaggtcgagtacggtggtacatatattgaagtaggtagcctccgtctgcgccagtccggcctcattcaccatcccggcctttttcatggcacgggtggcattcacactttctttccaggcagcttcggtagccacagctatctcatactgcgaatcgagcatcagcaaggtgtaatacgtattggcaacggatgctaccaactgcgtcttgacagcctgttcatattccttgctctgttcgtaggcagctttcgcacgacgctttgctgttgtcacctttccaaaaatatccagttcccacgaagcagtcacgggcagcgaataagtttgtgtagcctttccacggtcgaagctgctggcagctccttccggtgccagaaacaaagaaggcagataagacagtttggacgtcaacagcgtggcttccgcttctttcacacgcaaatgggcagtctgcatatcggtgttgcgcaagagtgccgaatccaccaaattctgcagataagggtcggtaaagacctcccgccacgagaggttaccgaagtttgccgtatcggtggcagcaacagactcgctgccgtaaagtccttcgggaacttccgataccggtttgtatttattgtagataccgcaactactcaatataagcgttgctgcggacagaatgattatttttctcattagttcttattttaattcaggtctaaaacctttaatcatcaattattcttttccagctttagatttttcttcctcgctcactttgatttcttcttcaatctgccagtcatgcgtcgggacgctctgcacgggacgcaaacgttcctgcaaccactggaaagcaataaacaaagtaggcacgatgaagagcaacgccaacgtaccgatggtcataccacctactacacccgtacccaatgaacggttaccgttggctcccactccacttgacatcatcaacgggaacagaccgaaaatcatcgtcaatgccgtcatcagaatcggacgcagacgggctttagccgcactgaccgcagaagcaatcagccccatacctgctttacgacgttcggcagcatattccgtcagcaaaatagccgtcttcgccagcagaccgatcaacataatcaaacctgtttgcagataaatattattctccagtccgaacatccaggcgaaaaggaagctacccatcaatccgcaaggcacactcaaaagcacagcgaacggaataatgaagctctcataaagcgcactcaaaataaggtaaatcatcaggaagcagataccgaaaataatgatcgtcgtaccgctctgctggttttcctcacgggtgatacctccgtaatcatagccatagcctttcggaagagactgttcggcagtttcctgcacagccttgatggcgtctcccgtactatatccgtcggccggcatcgcatttaccgcaatggagttatacatattgaaacggctcaacgattccgcaccgtagctacgggtcagcgtaacgaactggctcaatggcgccatctctccattcgacatacgcacaaaagcattatcgagggaagtttcgtccaaacggaacaccggatcggcctgaatcatgacacggtacactttagagaaacggttgaaattggacacatactgcccaccgtaataaccggacagcgtactcaacacagcgtcgggcgtgatacctgcacgcttacatttagccgcatccacctctaccgtccactgcggatagcgaacgtcgaacgtcgaataagccatcgatatttcaggccgctggttcaaagctcccaagtattgctgggtggtggtgaagaactcgttcatatcaccgcccatcttatcctgcatgtggagttcgagcgcattacccataccgtaacccggaatcatacccggagagatggcgaacacactggcatccttgatatcagccgtacgcgcatatacctgaccgatcaccgactgcacattgtcctcatcacccggacgttcgtcccacggtttcagtttgagaatcaacataccgaacgaactaccctgtcctgccaacaatccgtaaccggccactttctgcacgtgtttcagttgaggtatttctatcaggcgtttttcgatacgttccatcaccttatccgtcgttgtcagcgaactgcctgccgctgtactcacattgacgaaaataacaccctgatcctcgtcgggtaccagactggtcttcgtgttattcatcagtaacacaagcaataccacggaacaagccagcaacgaccatgtcaaccatctgcgcttgataaagaacaatacaatcgtcttatatttatccaccatcatatcgaaagccgaattgaaagccttacggaagcgtgccgcaaagttgttcttctgcgttccgtcttcattaatataaggtttcagcagcaatgcacacaaagccggactcaaagtcaacgcgttaatagcggagatacctaccgcaaccgccatcgtcaaaccgaactgggtatagaacgtaccggaagtgccgcccatgaaggacaccggaatgaacaccgccataaacaccagcgaagaggtgataacggcattactgatacctttcatagcgtcgatacttgccatatatgacgacctgtagcccacatcgaaccgcgcctgcaccgcctcgacgacaataatggcatcatccaccaccgtaccgataacgagcactagcgcaaacagggtcagcaggttgatactgaatccggctatcgccatgaaagcaaacgtacccaccagggaaaccacaattccgaccagcggaatcaatgtagaacggaagtcctgcaagaagacgtacaccacaaggataaccaggatgatagcctcgatcaacgttttcaccacctcatgaatggaagcgaacaggaagtcgttggagctcatcatctgcgtcagttccacgcctttcggaaggtctttacttgcctcttcgaggagtttgtcgatattctggtttacttcggtcgcattggaacctgccgtctggaacaccatacaggatacacccggatgaccgtccataccaccgtggtaagcgtagctgtcctgtcccagttggatatcggcaacgtctttcagtttcaagacttcgccattgtcggtggaacggatgacgatatccccgaattcttcgggagtaatgagacgtccggtgtacttcatcgtatactgataagtctcatcggaattttcaccgaacgaaccggtagccgattcgatattctgctcggcaagcacaccggtgatatcggacggaatcagtttgtactgtgccatcacgtccggtttcatccatacacgcatactatattcaccgcccataatcatcaggtcgcccacaccggagatacgaagaatctgcggtttcaggttgatgctgatatagttggacaggaagttctcgtcgtaactgtcgtccggactatacaatgagaacatctgcagaatactcgtctgacgcttggaagtggtcacaccgacctgggttacctccgccggaagttgtcccgtagcacgtgatacacggttctgcacgttgacagccgccatatcggggtctgtgccctgcttaaaatagacggtgatgctcaccgaaccggaattggtggcggaggaagtcatgtaggtcatgtcttccactccgttgatcgcctcttccaaaggcgcaataacactcttctgcaatgtttccgcactggcgccataataggtggtactcaccataatggtaggcggagcaatatcgggatactgctcaacgggcaagctgaacagcccgatgatacccactacgacaatcgtgatagagatgactgccgataatacggggcgttctataaaggttcttaaattcatgaatgattcctccttggtttaattttcagtagtagttgccggagacttcgttgttgtctctgttgatgaggattgattagcatttgtcactcctgccactggagtttgagcagcctttgccttgaccggagtaccttcacgaagcaaacctactccttctgccacgatcacatctcccggtgccaatccttcatctacaataaattcccgaccgccattgacacgggtcacttgtacctggctggattgagccttgccgtccactaccttatagacatatctcttatcttgtatttcgaaagtggcagcctgtggaatggtcagcgcagctgttttttgaacaggaacaatcacattacccgcaccaccgctatgcagcaatccttccttgttcgggaaaactgcacgcaggctgaccgtacccgtcgaacggtcgatcactccgctgatagattcaatctgtccccgttcggagtaggctgacttatcgttcagttgcaggtcgatggcaggcatatttttcaatgcttcctctttagaaccgtattggcggatcagtcccagtaattggttttccgtcatggagaagtagacgtacatatccgaattgtcggaaacggtagtcaacggctgggcaagagcggaactaaccaaagctcctacacggtaaggcaacgtgcctaccactccgtcggccggacttttcacaaccgtataagaaagattattgcgggcactcacttcctgcgccttggcctgtgccaactgtgctttggcagccaacagggagttttttgccgtactcaaatcgaaagaggaaattacgttctctttatacagttcctctttactgtcatacgtcagttgcgctgtagccagagaggccttggccgattcaacgtttgccactgccgtctgcaaagcagcttcatacggcacttggtcgatgatgaacaatgtctgtccgttctttacacgctgcccttccgttacacagactttagtcagcgtaccacttacctgggggtaaatatcaatatcctgacgtccgcggatggtcgccgagtaggcgcttgaaatcatccggtcggccggagaaacggtcatcacttcgtattctgtttccatttgtgccggaggagcttgtttacagcccgtagcagctaccatacagcagagcaacaatagcccttgcttcactttacatacctttttactcattttctgttacctatttaactatttttgaacgcggcaaaggtagactgttttcttcataggaaactggacttagtatcttcagttttgttcattttaggaacattaaaaccgatatttagtgaaaaagtcctatttttgtacccaaaataagaacaacaatggaatcaaaaaactctagcctagccatacttcatgaaccgttcgttgccggaatggacgaaaacctgtctccaattatgcaacgcctgtggaaactggaagggggtgccatctatttttgcagaagcggatgggcacacgtcacaatcgacctgaaagactatgaaatagtagaaaacactcaaatcgtgctcttgccgggaacgattatccgcatcaatggcaacagcagcgatttcacagcttctttcttcggatttcccaaagaaatgtttcgcgaagcctgcctccgtttcgagccgatcttcttccggttcatcaaagaaaaaccgtgctatacactcaaggatgaaagcacaggagcaatcaacgggttaatgcgtgccacaacagctatatacaacgatcgtgaaaaccgtttccgcaaccagatcgccaaaaatcatctccagtcgtttatgctggatatttatgataagtgttaccgctacttcgaccgacaggaaatcgaaggaggaagccggcaggatgaaatctttaagaatttcatcgcactggtacatgaaaactgtatctcacaacgggaagtgactttctacgccagcaaactgtgtatctccaccaaatacctgacaggtatctgcaaaagcgtgacgggcgaggctgccaaaaagattatcgacgactttgccatcctggagataaaagtgttgcttcaatccaccggactgacgattcaggaaatagccgaccgacttggttttcccgatcagtcgtatttaggaaggtacttcaaacggcacgaggggatgtcgccgaaagagtatcagagtaaatattctatctaatcaagtaaaataatcttttattattagattattaggcacggattacgcggttcttttattaactaaaaccgtgtaatccgtgcctccatttattttattaatttgtatttatcgcacaacacagattgttaacagatctgtaatactatcttaatctgccttgcattcctttgcaccgtgaaacaaaaacacgggtgtgaataactttattgcatttaataaattaaaagaagcaaggtaaaagattatgaaaagaaacaaatggctgctttctctgtcgattgggctcttgtgctgtggctctgcatacgcacagacaacagtgaaaggaaaaatcacaagtgaaggcggggaaccgttaatcggggctaccgtagctgtgaaaaactcgacagacggcacggtgaccgacatcgacggaaactactccctgaagactaagaaaacattgactcaaaaggatttgcttgtattcagttatgtgggatataaaacgctacagaagaactatgcaggcaatacgatgaacgtaaaactggcggaagagtcgcaacaactgaatgatgtggtggtgactgccctggggatcaaacgtgaagaaaaaggattgggatatgccacggaaaccgtgaaaggggatatgattacgagtgccctgcccaccaactggtcgacggcactgaacggcaaggtagccggattgagtgttatctcttccggtggtccgcttaattcgagccgtatctcgctgcggggggacgtctcgctgaaccagaacggaaacgacgcattggtggtagtggacggtgtaccgatgagtagtccgatgaccaatccgggtgttgcctacggtgcaggttcaaacagcgaactttccgtggactatggtaacggattctccgacatcaatccggatgatatcgaaagcatccaagtattaaaaggggccagtgcgacagccttgtacggtacgcgtgcagccaatggcgtgattatggtgactaccaaatcgggagcgggtgcacccaaaggtatcggtgtgtcttacagcggtaacttcagtattgacgatgtgatgagatggcccgattaccagtatgaattcggacagggattgccgagcaatatcggtccggcaggttctatctacgaaggccagccctattactcttacgggaaagcggaagacggcagttacgcaagcactagcggaaccagtagcgcctacggagcacgtttcgacgccaacaggttgttctaccaatatgaccccgtaacgcagggacgcgcttctgttgccaccccttgggtagcgtacaaaaacaaccgcaaagatttgttccagacaggatacaccctgaccaactcggtagccttgaccggaaaatccgaccggggcagcgtacgggcgtccatcacccacactaagaacgaatggattctccccaatacaggtttccagcgtatcaccgccatggtttccgcccaacagcagatttcgagggcactgcgcattaatttcaagtcgagttatacgtaccgcaagctcaacaacacgcctgcactgggatataacagtaactctatctcctacttccttatcttccagaatccgaatgtcaacctcgactggttgcgtccgatgtggcgtaccggacaggaaaatgtgaaacagctccaaccgtacagttcctttatcggaaacccgtatgtcattctatacgaatctgaaaatccttcggagaaacacagtaatgtatcatccatttctgccaatctgcgcatcaacagtaaattcgatttcatgatccggtccggtatccagttgtcagccgaccaacgcgaacagcatcgtcctatcagtgacgtggttttcggaaacgggtttttcaagaaacagaatgtgttcgattatgaattaaacagcgatgctttatttacttaccatgattcattcgccaacggattgcgtgtcaacgcttcggcaggtggaaacatgatgcaacaaagctacgatatgttggctgcctcggtggtaggattgattacgccgggagtatacaaactggcaaacggtgtttccaacccgaacgtgcagacggttatcaaaaagaaagcgctgaacagtctttatttcacggccaatttctcgtataaggataaactgtttctcgatgtcaccgggcgcaatgactggtcgtctaccctgccgaaaagtaaccgttctttcttctatccgtcggtcagcgtcagtgcagtgatgaacgagtggttcacgttgccggaacagatcagtctgttgaaagtgagaggttcgctggcacaggtgggcaatgacacagacccttacaagacatcgccctattatggcacgagcgatttccccggatcggccatcgtatcttctacgctctataatcaggatttcaaaccggagatttcgaccaattacgaaacgggattcgacttccgtatgtttcacaaccgcatcggactcgatttcacattctattataaccgcaccaaaaaccagattctggatgctccgatggacccgaccacaggttacagcaaagctaccatcaattcgggatgcgtccgcaaccgcggttacgaaatccagttggacgttactccggtagtcagcagggatttccgatggaatgctactttcacctggtctaagaacgagaaccggattctctcactggcggaaggggcggatgagaaccagttaatcagcagtatcggtagtgtgtctatcatcggacgtgtgggtggaactacgggcgatctctggggatataaactggtacgcgacccggaaggaaatgtggtcatcaacgacaacggattgcccgaacgttcgggagagatcgaatacgtcggcacggcctatccgaaatggaaagccggactgtacaatgaattttcttacaagaacttcacgcttagcgtcctgctcgacggacaggtgggaggtaaaatgtactcgcactcgcaccacaaaatgacggaacagggaaaactgcaacataccctgaacggacgtctgccgggaacggaattttatatgtcgaaagacgacccgcgcatcgctgccgccggactttcaccacaagacgggatgtacatgattgctccgggaacagtgaagaacgatgacggaacttactcgccaaacaccaaagtggtgaccgtggaaagttattataaggaatattaccggatggccaatgtggaaactaacacgttcgacacttcattcctcaagttgcgcgaaatgagactggagtacaagttgccgaacagcacactgaagaaaacaccgttcagcaaagcatcggtggcactctacgcacgcaacctgttctgtatcactgactatcctctgttcgaccccgaatctgccgccctcaacggaagttcgatggtgaccggtgtggagacgggctcactgcctacggcacgtactttcggactgaatattaacgtatctttttaaacactgacttatgaaaaccaataaacttttcaaaaatatagtatggggaatgactttgtgcggagctctctgcacgacttcctgcaccagcttcgacgaactcaatacagaccccacccgcatggatgaggtgaatcccggcactctgctcaacccgattttatacgaaacatcggtctacaactggaaacgctacaacagctatacctacgacctgatgcaatgtgccgtatctaccagcagcaccaacggtgtgggatggtggtatatgacggacagcgaaggagacggcacatggactacttattatagatggatcaacaacgccaaagagatgatgcgcctcaccggaaaattgccggaagcctccaaacaacccaactacgatgctatatcgctgactttgcaatgttggttataccagattctgacggatgccttcggtgatattccgatgagcgaagcctgctccgccgacgagggaatacttgcaccgaagttcgacacccagcagcaggtgtaccaacagattatcgacaatctgaaaacagctaacgagttgttcgacaaagctaacgggttgatctacaaccaatcgggcgaaatgttgtacaagacgtccaaaggggatgcaaccggtattttgaaatggaagaagttctgcaactcgctccgtctgcgtgcactgctccgggtgatcgacgtgccggaattcaacgcgaaacaggagctgcgtaccatgctgaccgatcccgccacttatccggtattcgaatcgaacgatgatgctgccctgcttgccatcagcggaacttatccggaggaagctccgctcacccgtccacaggatttcacttcttatgttcagatttcagagttctttgttaatctgctgaaaggttggaacgatccccgtctgcagatgtatgcaacacaggtcactctccccgaccagactaaagattatgtgggtttgcccagcggttatcagacgttgccttcaatcactgcttcgggactgaatcaggaaatggcgaaggcacctatgaaacttgccatgatgccttatgccgaagtggaattcatcaaagcggaattactgaaaaaaggagtgatcgacggaggaagtagcgctgccaaagaggcttatcagaagggagtgcaggcggctatcgaacagtggggacagaaaatgcctgaccattattttgaaaatccggaagctgcttatgatgatacgctggaacgaatcatgaaccagaagtttgtcgcactgttcttctgcgattatcagcagtggtttgaatataaccgtaccggttttcctgtgttacctgtggggcccggcatcgcaaatgctaataacaaaatgccgaaacgctttaaatatccatctgctctgcagcgtactaacctgaaaaattatcaggcggctaaagcgaacatgggaggcgatgacttccatatccgactgatgtggcaacaataaatgaatgtatcggtcaccaagattgcggcaataattatcatttcaatcaatctttaaaattcaatgaatatgaaaagaataatcagtatggctgttgtgttagttataacgatggcagcaacagcgcaaaaaggagagctcgccatgaacgagaatatctccggaaaagaccatgtttccaaaaacgaaaaagaagctactcccgtaggcaaaaagccgaaagcggcgtttatattcgacgtgtatggagaaatcccgactaccaaaccagtgtttgaagcggaacattatctggggagtgacattaccggaaaatggaatactttcatccagaattatacgcacgagtatgatgtaacaatcggatttacggattcttcggtcgaaattttgaagccttctatttacaaggcggtcaataaggtgaataaatattataagaaggcattgaagaaagaagaggtgagccgggaagttgctacattcaacatgggtcatattctagattgcgccaatgtgatgtgtttcgatgataacagcaagtcttttgaggaggctctcaagtcggcagatgaaccggaagaaattatcgcattattcaatcaggttactttaagaaagttataagcaatgaaaaagatcaattttagaaaaacgctgtttgcagcggttttgcttttccagctgaacgctattgccgcctttggtcagacggtggtgaaaggtagtgtgaaagataatacaggtaaacccatcagcggtgtagtggtgacagacggggcacatttcaatacgactgatgcagaaggaaattatgttctgaacactgatccgacacgttatccaatggtttacatctctactccggcaacgtatgagcttccttccaaagaggggatagccgatggtttctatcaatatctggatgccgggaaaagcgaaaaccaatgtgacttcgtattgactaaacggcagaagccggtggatgaatttgtctacatcgtcctttccgacccgcaagtgagaaacgaaaagcaactggaccgcttccgcacggaaacagtgcccgacctgaaacagactgccgactcactaaagaacttcgaaatcgtcggcatgggactgggggatctggtgtgggatgccatgaatctgtacgctccttaccggcaagcggtgtccaacttgggaatgacgatgttccaactgatgggaaaccacgacttcaacctgctctacaaatctataacgcagacggatcatccggcggacggttatggggaacagaattattatcagtcattcggcccggccaactattcattcaatatcggtaaagttcatgtgatagcaatgaaggatattgattacgacggcaacaagaaatacacggaacgcttcacgccggaagatttggactggttgagaaaagatttaagttatgtgcctaaaggaaatatcgtgttcctgaacgttcacgctccagtagctaataacacggtagctgcggggggaaatgcgcgcaacgccaatgcgcttttccaactgttgaggccttaccaagtacatattttctccggacacacgcacttttatgaaaatcagttgcccgctcctaccatttacgaacataatatcggagcggcctgcggcgcatggtgggcaggacacgtgaatcgttgcggagcaccaaacggttatctggtggtacaagtgaaaggtgatgatgtgaaatggcgttacaaggcaacagggtgttcgccggactatcagttccggctttaccaaccgggagagtttgaaagccagaaagactatgtggtagccaatatctgggattgggactggacgtatacggtaaactggtacgaggatggagtgttgaaaggtgctatgcaggcttttgacgatgaggatcaggattatatcaatatggtaaagggaaagaaaacgggttatcgcacacgtcatcttttccgtgcacagccttctaaagatgcaaaatctgtcaaggtggtggttaagaatcgtttcggggagatattcacggaagagataaaactctagttttatttcggtctgtttatactggtagtaattataattatactggtagtaaattataaaagtcatgagggagtttaagctttaacttccccatgacttttatttttgaaacaatctcactttaacggaaaatccggcacattgctactttcatcggtactttcctcatcgcccatagtgcacaaagcagggaacagatggcgcagaccacaaatgtaactccggtagatacaaggatatttcccaagccgaccaacggagaaacaatacctccggaagcaaaacagagtgctcccagcagggcggaagctgctccggcgtaacggcgttcgctatccatcgccaaggtggtggaggaagtaaaggtcagtcccattgtgaaaagtaatgcgaacatcagcagttcataggtccagaagccgcatccgttatacaaggcaatcatcacacagacggacaggcacaacataccgatgcatccggtcagcgtcccagtttcaggttggcggaatttcacggagatagctgctgccaccccgatagctaccgcattcaccgcgaagcaagcttcaccttacggtacatattatatcgcatctttacttcaggagtggttgtgcttctttctattctttctcctatttgatatgctagctgccattcgttaaaaaacattatatttgagcctatatagggttacaacttacttgttttttttcataattttgcaaaccaaaaatagaaaaataggtatcaaaatgaaactaagatattatcaaatcgccattcgttacaagaacaaaatgcatgactttcacggttggggtgtagcagcgcagatttgataaccctcctattttcactacagagaacgccagaggacacagcgttcaaataatcttcattaacttgtgtcaactgacatatttcaaaagaaaaaactctgtgttactctgtattattccgtggtgaagaaaattcaaaattctactattaattaaatttcttttcactttatgagcaaaaaaagatggctcatagtgccgctatgtgccgtgctatgcagtcagggactgtttgcccagacgcttgacaggagagtgttgggcattgacgaaatgttccgtctggcagacgagaacagtcagagtattcaaacgtataaaaccggaaaggaagcagccgatgaagctttgaaggctgccaagtcacaacgtttgccggacataggtgcctcactctcatttagttacctgggcgacggatatatatgggaccgtgacttcaaaaacgggcagaatatccctatgccacacttcggcaataactttgcgttggaagcgcaacaagtgatttacgccggaggagccatcaacagcagtattactctggctgaactcagtcagcaaatggctgcattggactgacagaagaaccgtcaggaaatccgctttctcctgaccggctattacctggatttatacaagttgaataaccagctgcaagtgttacagaagaatctggatttgacggaacaggtgatccgcaacatggaatcacgccgcacacagggaacggccttaaaaaatgacatcacccgctatgagctacagaaagagacgctgaaactgcaactggcaaaggtgcaggatgcccgcaaaataatgaatcatcaactggtgactaccttacaactgcctgccggaacagaaatcgttcccgattctaccttgctgaacgaggaagtgacagcattagccgaaaacgactggcaaatgatggccagtcaaagcaatgtaggactgcaacaagcccagctggctatgaaaatgaacgagcagaaagtgaaattggaacgctcggaactgcttccgaaaattgcacttgtggccggtgaacatttagatggtcctatcaccatcgaagtcccggtgctcgacaataacttcaattactggtatgtgggggtcggtatcaaatacaatctttcttctttatttaaaaacaacaagaaagtgcgccaggcaaaactaaacgtccgcagagcacaggaggaatattcactggcacaggaacaaatagaaaacggtgtacaagcgaactacgtcaactttctcacctctttcacagacctgcgtacacaggagaaaagcgtggaactgcaatatctgttttgaaaatagggaaaagaagtaagaattgaaaagaaaagcataacaaaagcaaatataacaactaatttacagtgctttatgtggtatcagtttcgggattgacttcttaatttgttttaatccgtttcaagtttcttcgggatatatgggaacatatatgggaatttatatacctttgcgatatgaaccaaaaacgcattgccgatgaaagtttccgtctatctgaaaaagtgttcctctacgacctcgaacatctgtttccgtgtccgtgagaagaatgtggatataaaggtggtttcgtctcttacagttcatgacaagtactgggatgcagataccctaagttataaacgcacgacagccgtacctgccaccgaccaaaaacgcctgcccgaacagattgccgccattatcgagaaagtggagaagaccttttcggacaaggcggacagcaaatggctgaagcaggttatcgaagatgtgctgtatcctgcccgtgccttcgaacgcaaccatccgaacctgctctaccgtgttcatgaatatctggagaagtacgaaggggctgatagaaccaaagagcatatcatacgttttgagcgtaagatgtcccgctatcacgactaccaacgtgaaatactgggcaatcgtgacttcacgctctttgtggagactgtcacactggaacagatgaacggtttccgggattatgtcgcgaatgagtacctgctgcgtcaggagcatcctgagttctatgttccccgtatgcttatcaaccacaaacccaagccgctttccaacacgaccgtcatcaacatcatgaacttcttctgtacattcctgcactggtgcaagaggatgaagtattccgacaacgaggtgtatgcactttacggctgcaaggaaccgacatacgggaacccgttctaccttacttcggaggaaaggaatgtcctgtacgatgcggatttgagtgacaatcctaaactggcggtcatccgggatatattcgtgttccactgctatatcggctgtcgcgtcggagacctttaccggctgacaagggaaaacatcaaggacggctttctggaatatatgccacagaaaacgaaaaagtgtcaggcaaagacagtcagagtccccttgcacgaaaaggccttgaagatactggaacgctatgatgtaaacgcggacaggctgtttcctttcaagcccatacatacctataatcttggcatacgagaacttttgaagtattgcggcattgaccgtatggtcaccatccttgacacgcacggctataataccgtacaaaaaccattgtatgaaatcgccagcagccatacggcacgcaagacctttgtaggcaacctgtacaaacaggtccccgatccgaatctgatcgcttccctgtcgggacacgtggaaggaagccgggcgttcaggcgataccgcaccatagacgatgacatgaagcgaaaactggtagaaatgataaactaaggaggaaatatatatgaaagtaacggcattcatcagaaagacatcggccaagaacaatgtgacggatctggcacgtgtctatttccgtgtccgggatattggcggagtcgatataaaagcggcaagcgagctttccatcagccccaatcactggagcgcggagaaacagggttacaagccacgtgtggctctggtatcggaagagaagcggatgaactttgacagggacatccagcaaatcacccaccttatcacaaaggagtaccaccgtggtgtggacgggaactggctgaaaagactgatagaggaataccaccaccccgacatcaacgcaaggggcggcaacaaagccgaagaataccatctcgtctatcagatcagccggtatatcgcagaaaacactttggcggacgacagctacaagcaccatcttggcaatatagacaagataagccgttacgagcgtttccagcatgaagtactgcaccgtagaggctttaagttgtgtattgacacgattaccgccgatgatttgcgggagttcaagagctggctacaggaggaacataatcttgccggacaatatccattgttctataaggatgtggaaaagcagaaatacgagcaaatccgctccgagaacagcattacaggctatttttaccggataaggacggttgtcaagtggtgcatcaagcgcgggctgacaagaaacaatccgtttgaccagtaccagataacccaacctatgtacggcgacccgttttatctgaccctcgaagagagggacagggtttactatgccgacctgagcggtctgggggccacccatccggtctatcgggacatattcatgttccagtgcctgatcggttgccgcgtcagcgacctgaacagactgaccaaagccaatgtcgtggacggatgtgtggaatatattccacagaagaccaaaatggaacacgccaatacagtcagagttccgctcaaccaaaaggctttggacatactggagagatataaggacttggaagacgcattacttccccggttctctcatttcggttacaacaagaagataaaggagattctcaaatatgtgggcatagaccgtatggtgagagtcctcgacccgaagacacgcgaggatgtggcacggcctctatacgaggtggtaaccacccatacggcacgaaagacttttataggcaacttatataagcaggtcaaagacccgaacctgatcgcctccatgtcggggcattcggaaggcagccgggcttttgtacgataccgcaagattgatgacgatatgaaaaaagaactggtaaacctattggattgaccgtttccctcttttctaatatccccttttatacttgccaataatataatccctatgtttacaatcagggtaagccgcgatgatagcggataaatgaaaaagctatcgagattttggttagattaaagctgcaaaacctttactaactaaaacgacgatagccatgagagagcaaagaaacaaaattagtttcagaggacaaaagatttatgtaggaatcgacgtccatttgaagagttggtcggttacggtcttgtccgaaacctccgtattgaagaagtttagccagcatccgagcccagaagcgttgtacggatttttaactcggagttatccgggcgccgagtatcactcggtgtacgaagcgggcttctgcggattttggatacacgagcgtctgacggccttagggatcgacaacatcgtggtcaatccggccgacgtgccgaccaagagcagcgaaaagctgcgtaagaccgacaccgtggacagcggtaagctggcgcggagtttaagagccaacgagctgaaaggcatttatacgccggacagcgtatcgttggagatgcgttccttgataagattgaagaactcgataaccaaagacacgacccgtcagaagaatcggctcaagtctcaacttcggtatttaggcatcgagattccgcaggagtttctcactccgttttccaactggtcgaagcgctttttcgcctggttgaaggagatagagacgctcaccccgagcggccgtcaggccctcgacattcatatccggcatctggaagagttacgccgtcagaaactggagatgacacgggctttacggacattggccaagacggatcgattccgcgaaccgctgcggttgattatgagcgttccggggttcgggcaggctacgggaatggcgttcctctccgagatatgcgacataacccgcttccgcaatgccgaacaactggctgcctatatcggaatgatcccgatgtgccactccagcggagagaaagatgggacgggggatattaccatacgaaaacacgccgttatgcgctgtaacctgatagaagcggcatgggtggcggtacgtcaagaccctgcgatgaacctgttctatacggaacaatgcaaacggatgcccaagagcaaagctatcgtaaaggtcgcccgcaaactggtaaaccgtctattctttgtgctgaaacatcagaccgaatatgtcaatagtatcgtgtcatagagaaacccttccggtaaacggattttcccagagagaatactacatagttgttgcggcgttaacgtccgcttaaaataatctgctcctctggcctttgtaaactaataagggatatgcggcagagagctgaccgctaaggaaaatctgtttatcgaaggattttttcgggttctgaaatctcggctttcgagagagccaaaggtgttaagcacgatgtgcctccgcaccggctcgatcaaaggccggcggaggctctcgtgccttgacctttggccgagaagttcaccaagaaatgcaatacgctgtaaataagataaaaacaaatttaaccgaaaactttgatccaattttatttggattgtaacaggaaaatacactatgaatatggatgaacgaaatttgacatacgaccagttcaaggcggatatccttcattggaagaacacgcacagagaggaatacaaccgtttcgcgcgactgatgacaaacggggacgagaggcagtaccttgacatctgtaaggccatattcagacaactgcccagaatcaagactgaatgggagttatgttgggatgatgacagtaaggggaattttgagaatatagacctcatgttcaaagaggatgcagtacccaagcgaatagtggagttataccatgaacagagggaggagagtaatcctttgcatgatacagctccggccacattatgggacaggataaaatccattttcagcagcaagcccgaagaaccgcgcattatcctttcagcacctcttgtgttgagttggctgtactacggaaagagtttcgaggcgatggtcagcatggtcagcaaacaggcagggagtccggaagcagacgaagcggacagacaaagctgttcttttgttacccgacaaatcattagcgtatccatcaaaagtggtttccgtacccgtgccgactgggacgaatacttcgccatgaacgaagccattaaagaaaatcgcatcggtgaatgggcgttgcaatccgcaacagccgaaatggaatccgatacagacaggaacgttggtggcgcggaatcaacagattccggcattgatgcagtatcaaagatacagcgtacagccggaaagaaaaagatacaggaacgacctcttatagattatcttaattgcaagaacaaaacggaggtcctacaatgtctccgcagttttgtttccattaacaggagtgccgtccatcaggcattgccgtactatgtactgaaagaattgcgactggtggacggtatgcataccgccaaagaatacagcgttggattgaccctgcaatttccggatttgccgtctttgaagagcgaaagtgccatacgacaggccgtcgggtccctgaaaacggcaaggcacataatcaaggacgggaaagaccagtccgcaccacttatagaaagtgacgaaaaccgggaactattccggacattgacagaggaaatcagtggcattatcagaacagatgaagaaacagatattgcagaataaggtaaaataaggctgttttatattgtcatgcagtcttaaattgtcatgacgatttaagacaaagtattatatatcaattagttttaattcatacatacttttgcaccgtcaatcctttccccgaaggttggcggtgcttctcttttacaagccatcgggagtgaggcatcagggaacttttacagatggtcgtgataaatttcaaaactgacatttatgattaccatagaaaccctggtcgaacagggagctaatgtaaaactggaaattactccctcggacctcaagatgtttgccgaatccatcgtacagcgtaccatcctggcacagcaggaagagcagaaggcagtaatgcagcgtgaagcggaagaagtctatctcaacacgaagcaagtccgggaactgctggacgtatgcgaaggcacgctcaacctgtgggcgaagcgcggctacctcgtgcctgtcaaggtaggcaacaagaacatgtatgccaagtccgatgtacgccgcgtgcagacagggggcaagtccgaaagtgtaacatcctattgcaagaggaaaaatggctgacatgaaaaacagccggcttgaactgtgcaaccgaatccgcatggaggcggagcataccgaagacacaggttttcctttggacgcattccctcaggccgtacagtccgttatacttgacatgaccaaatacgagaactacatgattgagttcattgcgacgtccatgctgtcggcagcatcgacagccttgggcggtacttaccgtatccgcatcaaaagcgactggcagagtaacggcgcactgtacatcattctggtgggccgtcccggactaggcaagaccccaccgctagaagccgcataccgtccaatccgtaaacatgactatgcccttttcaaggcgtatgaggcagaagtggaagcatggaaagcggcaggagaaaacggaaagaaacctgttcttcaccgtactatcgtatccgacttcacacccgaatcgcttctacagacacataacagcaatcctcgaagcgttgccattttggtggatgagatcatgggcatgttcaattccgccaaccgctacacgaacgggcagctcatagagcaattgctgaccgcatggagtggcggagccttggatgtaataagggtaagcaattccactcctgtacatatagaacgcccgtgcatcaacatcatcggaactgcacagaccaaacgtattcacgaacttctcaaaaaaggattcgaggaaaacggactgcttgaccgtatcctgttcgtgcttcccaaatccagggaagtatcaaaatggacaaaccgggatgatgacggagaaaagacctctttggctgcaaaacgttgggaaaagatactggacaaggtgcttgctttggattatgatacagaaacggaaggagacggaatggaagaacacgctgcccatgtgctttccatgaacagtgaagccaaagagtatttcttctcctggtggaacgaaaaagtggaacgtatcaatcggatagaggatgatgccgacgttgatagccgggagatgaaacatccgtctcacgtggcacggctggctctgattatccaagtcctgcggtatgcttccgatgaaagccacctgcagtttgtggatccggtgtcggtgaaagccgctatccggctgaatgactatttcgaggattcatacatacgcatccgttccttcgtggcagacaatacctgtgaagagcctcccaaagtattgttgtcgttgttacccgataccttcgatacgaaaacggccatagcggtcggtaaggaactgcagaacatcagcgagcgcacggtgatgaactatctcagggagttgtgtcacagcaggctcttgaaaaagtccaaagccgggcattacgagaaaatggtgtatgaatccggtaaatattccataaacgaaaatgaaccatcaacccaaaactgcaatgaatgaccccgcgttgcagcttgcagtttcttcagtcttgcagttgggggctctgaaaacgatgttttcctgcaaagctgcaaggactgcagactgcaaatggtctttcggatttgcagtaatcaaaaacgaaagcattatgagtgagtacagattccatcttcaaaaatacagaccgggcagtaaaacagtttgcccaaagtgcggcagaaagtcctgttttacccgatatgttgacgggaatgcgcaaattacattccctaaccatgtgggcaaatgtgatcatatcaacagctgtggctaccattataccccgaagaagtattttcaggataatccaaccatcaaagaaaccatgattgaacaaaacaacagaagcgacaccccatcaagagccgtcaagccaatagcgaagccattatctagttctgcaccacagacttcttatcttccctctgattgggttagccagtccatgcagaagtttgacgtcaaccctttataccgatatctaaccaaagtggcaggcaaggagaagactgacaggctgttcaatctttataaggtcggtacatccaagatgtggaacggggcaaccgttttctggcagatagacatcaacggtaatgtgcgggcaggcaagattatgggttatgatgctaagaccgggcatcgaatcaagcatccgttcaatcaggtaagctgggtacattcggtcaaaaagataccggacttccatatgaagcaatgtctgttcggtgaacatctgttggctgatgcctcatcctcgacaaggactgtcgccattgtcgagagcgagaagacggctttggttgccgcccagttcattccggacttcatctggcttgctacaggtggtatgcacggatgcttcaacagcaaagccatgcaggtgttgagaggccgggaagtgattctatttcccgacctgaaggctacggaagaatggcggcgcaaagtcccgatgctgcaatccgtctgcaagcgtgccacttgttccgacctgttggagaagatggcgaccgatgaacagcgcagtcagggattggacattgcagatttccttctgatggaagatacgccgcagatgatcctacagaagatgatagaacgcaaccctgcattgcagaccttgatagatacattcgacttggaacttatggatgcaatgcaggagtagagcgacaagagaatcggacagcttgctgtctgtgtaaaagggtttgtaaaatcccgtagcttattagggcattttcaccgctttcactctccgagtggcagtcaaaaagcccataagcgaagggataccctctcgacacccggttgtctgcggcacgtaggacgggattttacaaaccaataatcagagtaataacagcataaacgaaagatatatgggtaatacacaatatgcagtctgtcacctgcaacgtggcagcggtaatgactccggtatgtcatgccatatagaaagaaaggatgccaaggggaagaagtatatacctttcaatgccgatgcgaacaggacacatcttaatcgggaattggttaaatttccagatggagtaaaaaacaggacggaagccatacaattcagaatagaccatgccggactacatcgtaaagtcggcaagaatcagacgaaagctatccgcatcatcctgaccggaacacatgagcagatgatgaagattgccgatgatggcaagttggataaatggatagatgccaatatgaaatggctaaaagacactttcggaagtgagaatcttgtatcatgtgtgctgcacttggatgagaaaactccgcacctacatgccactatcgtacctattgtaaccactgaacgacttcgtaaaaagcgagagggcgagaaaaagtatgaaacgaaatccggggcacgcttatcggcagatgatgtgatgcggcgcaccaagctacacgaatatcagaacagttatgccaagaccatgaaaccgttcgggctgcagcggggcattgtcggctccaccgccaaacatcaggccaattcggattattacaggcagcaggtcatccgttatgaggaggacatagccaagttgcaggcagatgtggagaaggcgcaggagggcaggaacaccatcctctcgtggttcggcaagggagaccttgccagagcaaagaaagaactctcgaacaaggacgaagagattgccaggctcaacaaacggctcaaggagcttcaggcagaaaaggcatggttgcaggaacaacataaatcagaaatcggaaaactacgaaatggctatcaaaaagaaatagacaaggccattcagcaagctgaagaggcagaacagcagtcaaaagagaaagatacagtcatagacaggctgcgaaagcagataagtttgcttgaccgcaaggccaatcctcagcattacagcctctcatccggtgccaatcttgtacgtatcaatgtctcaaactatcggaatccgtcgctccatatctggacacgggtcggagaggaactttttgagaatatcaaattccagatagactatgatacggcccaaaagcattttaacggcgaaatcacggacgaggagtttgtcaacgctgtattcgatccgcaggaacaggtaaacggaaaacaggcggaattgctgggcgctgttttcacccttgccgccggaggaccggcggaggttcatgtcgggacaggaactggtggctcatcgtctgaccttccgtggaatgataacgtagcaaagaagcatacttcgattaaacgaagatagttgatttatagtaaatatatttattgcaaattcatatctatacatacaagtatttgctatattttatgtacttttgtagtcaaaaactgacaattcttaatcgaaaaagtcagtacagaaataaagatcatttagtttacataaatagcattgatattttgtaatgggaggacttttaacattcagagtcggaaactttgacacaacagcagaacgtgagcagtttcggtttctctgtgagcaactcaaaactcactatgaggattcgaatgaattctgtgtgttcgcaggcaactataatattggatgtgagttagatgccctctttataaagaaggacgctattatttctatagaattcaaaaattatggaggtaatgttgttgccaatgaaaatggagaatggacatgcaatggtaaaattattaagggaggttcgagaaagactgttcttcaacaagctaggataaatcattccacggtaaagaaagaacttaaagtcttaggtgttgtaaagaaccaaatcaaggacgtgccacaccttattatttttcatcaaccaatagagttggagaacaatttaagtgccaccaacaggtcttggcttcacattactgatagcgaacatttcattgaaaagttggatgacatcacttgtcctcacaccgaccttgccccactcggaatcgttaaacttgcggaaactctcaacctaaatcctttctacctgacggaattcagcaatgctacttatgataaaccagcagagccaattgagaaaatagagttgatcgaagatataaagaagtacgagccccacactgaagagaaaaaacaaaagaaaaaagaggtaatgttaaactttgattcttttgttgtcgaggacgaaaatagtattgcactttcgaattttgtgaaaaggatagtaaaattatcgctcaagctcgacaattttacagtcaaggtgcttgacagcacaagggcatcttcatcttttgcagcacacggaataaggttaactcaagaatatgttgtgacaataaatgcagatggcatcggtgaacattgtgcaaaactcgcaaagttcattaatcatgctgttaaagccatttcaccttctacaatcttttgggaagaaggcgagagaattgcaaccgaaagtgacaattcatctggcgttgtcgaagaacatcaatcaaaagaactatcaaatactaattcgaacgtttgtttccgaaagtcaaagacgattctgccacattggcttgacaaaaagattttcaatgaccatcaagctatttatgctccagagcatgagcgttatgagtataatcttgatctcaacgaagaagaacttaaagtctatcttggtacttactttcctcgcagttatgcagaaatgttttgtattgctgataatcttttgcagaataaatgcctgaagaaaacgttggaacaagatgagattagtgtattggattacggttgcggtacgggtggggaaattcttggcttgattacagcaattggaagacatttacctcatacaaagataagcatcacagcaatagatggcaatgatggtgctttagccatactcaaggatttagtagagtgtaaccctaataaaaatatacaagtcgaactaactacatttagccaaacattaggctctattgaagacgtggaaaaacttgcattcggaaagaacgattatcattttatcctctgtgacaagatggtttgtgagttaatttctaaagaagtcctaccaataaatgcatacgcaataatggcaaagaaacttacggcttttcttcatgaaaatggtttgcttataatgcttgatgtaacaactaaagacgaacattcaggatacttctatcctcaattgatgaataatacaataaatgactatgtttgtaaaagcagaaccattgagacgcttctaccgttgtcgtgtgcttgtcatgatggatgtagagacttttgctttatgcagcaaacattcagcgtaagtcattctcacaaatcaaatgacgaaagcagggtgtgttatcgagtgctgtgtaagaaaccgcttaagacagctatcatgcaagggatggaaacagcaaaccttatccacgtcatacaccccaccaaatacaagcaaaatgatgatttggcaatttgcagtcgatctaaaaacaataaaataataattgatagttttaacataaatctataaatctaatcatggctaagagaagtttttacgttaaagattccgaacttgatgattaccaggtaaaggtgattaacaagaaaacagataactcctacattgttaaagggtgtgctggtagcggaaagtccattcttgccttgtggaaggcaaaacaaatacaagatgagcataagggtacctatctttacattgtgttcactaaagcactaatgcaatatatggctgatggcatttcacaggtaggtattccacaacgaaatgttgattatcattggcattggcagaatagagctggatgtccaagtgctgattatattattgtggatgaagcacaagatttttccaaagagaggatatagaactattccgttctaaggcaaaaaaagcattattgttgtatggtgattcggctcaacaactttatacttttattaaagataagcaaactgtttcaatggaggatatacagtattttactaagttccctgtcgaacagcttgtgttcaatcatcgattacccaaaaagatagcccgtcttgcacagtatctaaattccgaaagtgacgaacttgaagagcgttgtactgaagagggtgttgaaaagccaaagattatcaagtacaataacattactgaacagtatgatgccatcatttcgcttattcaaaacaaaaacatggaggatgtcggcatcctatttagacacaatgatgaagtagagcgtgcatatgaatatttcaagaatcatggtcttaacgttgaagctaagtatggacagtttatggatctagatttttcttcagacaatccaaagatgatgacctaccatagttctaaaggacttcaatttgaacatgttttcattcctgaatgtactgttgaagacgatgcaaaccgaaatccactatatgtggccgtaacaagaacctatcgtgctttgtatataatgcactcaggcaatctttccagtctttttgatgatgtacctacttcgctttatgatacgagtcttacgagcggtcccaaattaacactatgaggtttgtcaactcctaaaaaacgaggataattatgaaattatacataccaacctgtactctgaatttcaataacatattgtcttcagagtcaatttcgcccttaggattttacgcaagacgcggctttggtaacaaacgcttctatcctgtctgcgcgaacgacaaagaccaagtaataatattgtacagtaaatatccaaggttcgagattgaagaaaatgaccttgagaactatcctatggttattgagatagaaactgatgactataaagatggattctttgagaaggctaaggaacatgacggagtagaggcctatctctgctatcataccatcaaccttaacccttttcattgtcgtatctattttaatagttatcaggagcgtcagggtgtattgtcaaaggcagaacaaagtctggagaataagttctataagctttatgctcctaacataggtgttaaacccaaagagaaaaaaacattttttggcgttgccaaagatttatttactcaatctgaaaaagatgatttcttatggaatcctttatatgtaaatttcaagatcaagaatgaacctatagatgttagtagagacgttctgctagacagaattaaaggtttcatttattgttatctaataggtgctaatagctcggtcagcaacgaggttggcaaattgaaagctttatcaagaaaacttcgtaacacgctttctgctgttgtaaattctcctgataaaagacccactcaggcacaagacgatgctatcttgaatggaatcagagtgtttaatgaaatctattcttcaatagatgaagataccatttggaacaaaaatttattagagttaaaattgtctgacaatccgcaaggtctttctacaaaagatgccaagaatcttttgcactactggggtgtttatgacgcattctgtaacaaacttcctcttcgtagagtctatgatgcaaacgaattgtggagttgtttagagtatgtttccccagagacgttttctcgtgtcacagacaatatgaatagcgccattcgtaaattggaagcaaaagataatgctcaacgtgaaaagtatgccattgaggaattgctgaatgttgatgataatctgtctttgcatattttggacacatcttaccaaagttctttctataagaaccttatttgctcccagtttatggcagagtacaaatctgtaatggaagaaaatggcgtagaagaacctttggcacaggcatataatggaggtatgattctaaggaacatgcttggagataaatgggactcaaatcctgcatctgcttatgttggagcattacttaatcattttcaggagaactccgcctttgacttattcgctattgaaaatgatgtactttcatcgtttgctgcattctgtcagaaaggcgataacattgatcgcttggtagagtaccttgtacaagtaggattctgtaattataagttagcttatggcatctatggtgccacaagaggttttacgtctctgccaaagacatttacgtctgtattgattaatggcaataaggattattatcaatcatttgcaagtaatgtttggcgaatgcttaatggagtagaaataaaggatgcagtcttaccaaaagcgagcaataatacttcagttattgtagaaagtcagttgggatctaagattattgagaatctaaataatgtagagtcaaaagttgtaaaacagcagaaagttgttgaggcaataaataaggctgttgaacttgaaaatatagttcaaagtcctaaagcttttatgtatatttttagtagtttctcacgtattactacaactaaagcgtacaaagctcttgatgctgttaattttgcaggagatgagggctcttatacaccagaacaattccgtagtaaaatttattcgattgtaggtaaggaaggcttaaagacccaaaaagaaaatattgataaagctatagaacttgagagtaaaaggcaagatccagaagcgttcttgagcatccttgacaacttcttgaaaccaactgatgctgcgtataagaagattgagaaactaatttcaagtattaaaagtttaaatacgacttcgcatccacaaccacaaggaaataaagttatttcgcagggtggtgttgaaaagcgaaacctgaaaccaatacatccaacatcatctaaatttgtagaggatgcaaatgttaactattttatcctttcaagaaactacctacctataaaaatgcgagaaacgctttccagaaaggtaataacatttcaaaaaggttatgctcctggtggtaaatactgttctaatccattggataaccctacagataatagatcaaccattgatcattttaagcattggtgtttttatgataaaggtggttatcctcctatcgtagagggaacttatgagaataaacagtactttgagcagttaatgcaagatttatttaatcgttatgccaataggtaaaattattatcacgaacgatacaggtgaacaagtagaagctacagctcctgtcattgtctctgcaagtcgttcaaccgatattcctgccttttatgccaagtggttcttcaaccgcttggctaaagggtattgtgcttggtataatccgttcaaccagcagaaaatgtatatttcgttcaaaaactgcaaggtggtgattttctggacaaaaaacccaaagccgattctcccataccttcatgagcttgacgaaaaaggaatacactactactttcaggttacactcaacgattatgtaaaagaaggttttgagcctaatgtttcgtctgtcgaaaacagagttgagacattcaagaaactttctgatatgattggtaaggagaaagtaatctggcgttttgatcctttaataattacgccaaacattgctcctcgtgacctcttgacgcgcatttggcgcattggaaataaactgaaaggttacacaaataagcttgtattcagtttcgttgatgtaaaagcatatcgcaaggttcaaaacaatcttgttaaggaaagtatgctctttacaaaggagaatgtggagaatgccgaagccaaccttgctcaacgaatagaaattgtagaaggtcttcaaaagattcgtgaagcttggcacaaagatggttgggatgttgaaatcgccacttgtgctgaaaatattgaccttgaaaaatacgggatagaacacaatcgttgcattgatggcgaattgatgaaacgcatttttgctgacgataaggaacttgtctattatctacatacattgaaattaccagaaaaagacttgtttggtaatttgccaccaataccagagaaggtgcgtaatgtaaaggatacagggcaacgtaaggtatgtggatgtatggtcagcaaggacatcggcatgtataatacttgtcgtcatttctgtgtctactgctatgccaatacaagtaaagaatgcgtcatccgaaatgctgagaaacataatgatgaaagtgaaagtataattgggtaattatgcaagagtcagaactacaacaatatctccttcgcaactatccacaagagaatgctcgttgcgaatggaaggaattcaagaatttgaagaactcgttctgtggggatgagaaaaacgatgtcatctcatatgtgtcggctattgccaatatggaaggaggacatttagtgataggggtacatgacagttctttggaaattgtcgggacggatacctataattatgactggcaaaaggcaattcttcgtttaacggaacgatgtgttaatctttcgacagaaggtctcgatattgaagagtttgttaccgatgacactaacaagaaagtttgggtaatacatattcccaagcatcgtcccaaattgcctgtttacgctcataacaaagcatggcagcgaattgaagattctcttgtagagttgaccactgaacgcatgaatgtcattcttgatgagccaatatttggtgaaacagattggtctgcacagattgttcctgatgcaacgatagatgaccttgacgaagttgctatagctaaagcccgcaaaatgtttaagaaggtacatagccgtattcccgaatccgaggtaaatgcttgggatattcagacatttcttggcaaatgcggactaacaagaaatggaagcatcactcgtgccgctatcatattgttaggcaaatacgaatcagcctttaaactgcgccctgttgtcgctcaggtaacctggacacgcagggatgcaaatcaagatgtggttgactacgaacatttcactgttccattcatactgacagtagatgaaattctctcaaagattgaaaatctgactttgcgtgaaatgcctggtggtacgcttttcccagatacaatgaagcagtatgatgactacactatacgcgaagcacttcataactgtattgctcatcaagattacacgatgcaacagcgtgtcaatttcgttgagaatcccggctatctatattattccaacgccggtactttcatccccggaactttggaaaatgctttgagaaatgaggaatctcagacctatttccgcaatgaatgcctatgcaaggcaatggtggacttcaatatgattgataccgtaagtcgtggcatcaagaaaatgtttaatgaacaatggcgcagacactttccgatgccggactacgagattgatgcggcgaaaaagaaggttgtagtacgcatatatggtaacgagatcaataagcgatatacggatttattgaagaccgacaacactctgtcattatgggattgcatatctctcgacgctgtacagaaaggcagattcatacatgaagatgttgcaaaagacttgctgaacaggggacttattgagggcgatgctcccaattatacaatttctttaggagttgctaaagctactcgtcaattgcaaggttacaccaagcaaaaaggacttgataaggacaaaattaaacaaatggttttgcaatatcttaagaatgcaggatcagatggcgccaaacgtgatggcatctacgaatacatcaaagatgtaatgccgcaagctaaaacacgggaacagcaattgaggatattaggagacattcttaatgctctaagtgtagataaacttatttttgctaatgggcgaacttggttcttgaaagaataaccacaacagatatagcggttttcgctaattatagcggaatttataacggattccgtcatattatagcggataatgacagcctattccgtcaaaaatgtttaaatccatcgaatttcgacgaaaatacatactgaactgaaaagaataaagaccatgttattaggagacaaaataaaagagttgagagaagaacacggtgtgctacaaaggcaattggcagctttgcttgatatagacactccaatgtttagcaaaatagagcgtggcgatagatatgccaaacggacacaagtaatacaattagctgagtatttcaatattgataaaaatgaacttcttacactatggctggcagacaaagtattggatgctatagaagatgaagacgaattaaagcgaaaagccattgaggttgcacaagaaagaataggctaatcctcacaaatatcgggaactatatggtatcattatcatacgatttccgatgttaatatttgataatcagattgatattttgcaatattcggttcaagcgtggaacttgccgaccagaactataacgtaaccagcaaccgttataaaaacgaccttgccctgctcaccgatatgctcgatgccagcaatatgaaactaagtgccgacctcggtctggtcaatgcacgtattaacttgatatacagttattataaaatgaaatatatcacacacactctctgacagagaagtaatgacttatcaaaaagaatccaacttataacagaatcaaattctcatctctcttaaaatagaacagattatgatagctagaaaaacccagaagataatatacaacattgtaattatctgtttacttatcggtggtgtcacttatgtttgttcccggtttatccacttgggaaatatcgaatatacggataatgcacaggtgaaacaacatatcacgccgatcaatacccgtgtaccgggattcatcaagaaaatctactttgacgagtatcagcaagtgcgcaaaggcgacacgcttcttatcatcgaagatgcggaattccgtctccgtgtggcacaggcagaagcagatttggcgaatgccaccgcaggacgccaggccactaccatcggtatcgccactacgcaaaacaatttaagtgtgagcgacgcaagtattgaagaagtacgtgtacagatggaaaatgccaaacgtgaactgaaccgttttgagaaactgttgcaggaagacgcagtgacgaaacagcaatatgacaacgtacatacagcatacgaagctgccaaagcccgttatgaacaggtgtcacgggctaaaatgtctacttctttagtgaaaagtgagcagactcatcgcctgggacagaatgaagcaggtgtccgcctggcagaagctgcgttggaacttgcccgtctgaatctctcttatacagtcatcattgctccgtgtgacggcacgacaggaaagaaagaaatcctggaagggcaactggtgcaaccgggacagactatggttgatatcgtagacagcagtgatttgtgggtaatcgccaattaccgcgaaacccagcttccgaatatcaaagaaggtgcagaagtggaaataaccgcagacgccgtgccgaacgtcacattcaaaggagtagtagaatccatctccgatgcaacaggagccgccttctcaatgattccgcaagacaacgccaccggaaacttcgtgaaagtggagcaacgtattcccgtacgtatcagtctgaaaggaaacaaaccagaagatttgaaacgcatgcgtgccggttttaacgtggaatgtgaagtgaaatattaacactccaattctcaatcgctttaattttttaattttcaattcttaattttcaattcttatgagtgctcctgttctgaacggtccttttgttttgccgatgttccgcagtttcgtgccgcggaagatgcaaccgtggatttatcttttcatagccgtcaccttccaactttcgggaggtgtctatttgggtgcattgaatcagatgatcggcagcatgtcactgatgcgggaggatattttaatgtgcatgtacgccaacctggccggtatggcgatctactttccgttactgttccgcatgaagttccgttttaccaataagaccctgcttacatcggccgcactgggagtattactctgcaacctgatagcaccgcatatcacctttctccctctattgtggttggtctgcttcatcgaaggtatgtgcaaaatacagggaactttcgagtgtatgtcaaacattcagctgtggatgactcctaaacgggatttcaccgttttctttccctggcttcatattgttattttgggaagcatccagctatccgacctgattacgacccgtttgatgtatcattatcactggacatacatgaacctgttcgttgccggtctgatgctgattgtcttattgatacagttcacttgtgtgaagcatttccggttcatgcgcaaatttcctctgtttggtatcgactggctgggggggatactatgggctgccttattagcggaaatcgccttcctcttcaactacggagactggtacgactggtggaacagcccggtcatccgccaacttaccatcgtgattttcatcactttaggaatttgtatttggcgcatgatgaccattcgacacccatttctcgaaccaaagatgtggacgtaccgccattttttgcctttattgggattagtcactttagtggaagcgttcctcgccacggagcacgtgctggaggaagtcttttacgaggaagtaatgaaatatgaagaactggtcagttcccaactcgattggcttgccattgtcggtatcgtatgcggttgtgtgttttcgtattggtggatgcacgtcaagcagtataattatgtacgcctggtcattgtcggctttatcgggttgatcggttacctgatcggtttctacctgactttatccaccgacatccatatttcacagctttacctgccgaccgtatgtcggggcttcgcttatgccgtattgagtgctacttttatggtgtgtctggaggaaatcatgactttccagcatttcttccagggattaagtgtgttcaatatgctgcacatggtagtaggcggcgtagtgggagccgcagtctatgcacagggattggcgtattatgttcccgacaatctggcccgttacggttcagccatcgatcatgtagctttcagcagtagtccgttcaatctgggtcactatatggaagagtttatcagtcagatgatggagataagcatcaagcagatttacggctgggtggcttatgcctgcattttcctcttcctattgttattgctctacgatttcccggctcgacgctcactaaaaagtataccaagctggaaagaggtggcaagggaggtgaaaaatacgttctggcggacaacacacacgccgtcggagaaagaaaaataggaagactgtttacctgtatatttattgaactgataatcaatagagtttatgccatccggctacgaaaacaaactgccgtagctatccggcataaactctacctttttctaactagtcacttaccttctatatctttataaatagttgctttttgtacagcccccatacaatcagataattgaatccgataaacagaaggccgtaaatcagagaggccagatgagcatcgggaagaacgctccaaatggaagtgtaaatcttctcctgcaagctactctccccaactgtaattacctccagcaaagtagctaacacaccggccactatataaataaacaatggattcgtaccaaaaacatggaaaggatatccccatttctgctttttacgaatatcaatcagccaggtgagaaacacaagcaacaaggaagcaaaaccacaagtcaccagcacaaaagtcggactccatactttcttattcaacggacagccgtaactcaacaaccatcctgcaaacaaaagagcaatacccagtatggagatctgcaacagccggtgatggatttcagtcttctcccgcaaaatatttccgcagaaataaccgataatcacttgcgcaatgcacggcaaggtactcaacaggccttccgggtcgaaaaagatacgcccgccatccggcaaccactcccgatacaaatgggcttctccgaatagtgtgcgatctgtaacggcaacaatattctgttcggaaagttcaaatccgtgtcccaaagccagcaagatggaataacctgccagaatgatcccggagatccatgccagatttgccggacgccggacacccacaatcagcaaggaaccaaagaaataagccaatgccaaccgctgcaacactcccagaatacgtatgtgcgagaaaggttgttctactcctgtgcacaccaacgagaaccaggaaagaaaaagtcccaacaaaaacaagatcaccgtgcgccgtaccagtttgatgataaaaccgcgactgaaatgatgatcgaaccgggataaggcaaaactcatggaaacgcccattataaacatgaagaacgggaagaccaaatcagtcggagtcagtccgttccattcggcatgtcgcaagggtgcgtaaatggattcccatgttccggggttgttcaccaaaatcattccgacaatggtgattccccggagtatatctaatgaaagtaaacgttctgatttcatattgttcttagtgtaccgggattaaagaaatcccggtttggtgaaatagaatccattcgcattcaaccatttaacatgccatttcaggcgattggtaaaatcaatccagttacggctacttccccacgccaactccgaaaatgcttgaagagagggaaacacgtgctggccaaacttccgttcattaggaatcatctccgtccagacacaagcctggaagcctaatacattttgcttcacgatgccgggaaactggggttcgaactcgaagttatacaaagagcttaatccttcgtctgaaggcgttgcactcaaatagaaacgggaccattccatgaatataatcggataacctttctgggtaatctttcccggctgatcgggcagccagtcacgccaataagtataaatcaaatcctgtggctctttttcaagaaaagcatcgtcccatcccatcactttcttgcctttacccttcacatagttcgtcataatcttcacaaaacggttttgcagttcatccactttctgataaccttcctgctgcatcaatcgctgacaaacttcacactgttcccagttatctttctccacttcatctgctccgatatggaaatattccgaagggaaaatctcgaccatctcatcaatgatggactgcacgaactgatagttctccggacgcgagggacagataggataagagaattcttctccccatccggcttctcccgtgcacgacaactcgggatagactttgatagccgccgagaaatgacctggcatgtcaatttcgggtacaatatcgatccctctttccaacgcataacttaccaaacctttcatctcttcctgcgtataatgaccaccatattgagaaccgtttctcacgaaacggggatctatctcatagttataatcctgttgggaaagttctacgcatctcttgtcatattcgtcaaagtcgcgccagctgccttcctgcgtcagcaacggatattttttcacttcaatgcgccaaccctgatcgtccgtcagatgcaagtgaagcttgtttatcttgtagaaagacaaacagtctatcacctttttcagataatcaaccgtaaacatgtggcggactacatcgatatgaaatccgcgccaatcatatttgggagcatcttttatatcgaccatcggaagatatttagcacttccggaagtgaagaaatttgcttgttcgagcgcttgtctcaatgtctggattccccagagaagtccggtttccgttgaataataaacgcaggctccctctttggtaacggtgagccggtaagcctcttttgccaaatccgattcctgtttcacacggataaaggcacgatcgttggaggcatcactgacggaaagagaaagtttctcttccagggtggatttcaacagttgcgacgtggaagccggaatgttctggctgacagtcacattctgcgaaagagagacaaccgattctttataatcgactctttccggcaaaggcatcaccgacagacgggtgggcactcgctccgggtagttcccgttatcattatcattgcacgacaacgatgtgatcgcacctattcccaacaagaataatattccggttctttttatcttatcataattcataacttatctacttttgtggattaatctactttgagagtgcttgtcacactctctttatttaaataaaacagtttcgctttcacaacggaagcatcacaggctacgggagctttccaaagttccgaatgaagggtcggttccgtaccatcggtcgtatagcgtatttcgcctccccggataggagtactggcgtggagttgcccttctttgatgcaaagtccgggatgaggtaaacggaaattgatacttcgggacgcccagtgaggcatttctttctcactcactttggagtagaacaggcccagttctttattgaaagcctgacgttctttctctcctgctaaagtgctccaggcgggaaaagcattccaaccgcgttccaccaatccgagaattttagggaaggtgtaatattccacccattcaaaatcacggatggtttcagcaaataattgtgcctgcactccctggatatattcctttccgaaagcggtcaaagtcgtttttccctttcccgcgatgtccggatcgaccggattgcctgccatatcggtacgcgaagaacgataaatgctatatggaagcatggagaagcctttggactcgtcaacatatcccgcccacgagagacctctttcgtcgggatgagcgtcataggccaaatccagatagaaattgttcacgttgcagagaatcaccggatatcctttgttggctatctggtaaggtatttcatccgcttcccattcaggaaccgtattccagcaatacactcctgctgcaagttggttcaaatgacgatcggttgtttccggatgtcccaacgctacttcctgccagccgctgaattgcaaatgatattgttgcagatagtctgccatcttcgtaatatagtattcagacagttcgtgggcacttgtcatcccgttttcatccataaacgtccggcagacaggagaacccatccaggctccttcgggtacttcatcgccacctaaatgaatcgtagtcaaaggtacctccgcttcctcatacatggctatcaactcacgaatcactttttccataaaccggtatgtagaaggcaatgctacattcatgacattatccgtataagactgcgcggaaacataacgggaagtgtcttgtgcgtcacttaataaatattcgttggccttttcaggggcagtattcacatacttatgatagcgcgctttcatggacacgattgccgcacgggcatgtcccggagactcaatctccggaatcacacgcacatgtctttgagctgcataacgcaataaatcgataaattcttcacgggtgtaatatccgttgccggaggtagctgcagacggatcatagttgccatcgtagcccggatataaacattccagttcatccgtggtatgtccccggcgtgcgccaaccgaggtcaattcttccaagccgggaatctccagacgccagccttcatcatccgaaaaatggaaatgcagtacgttcagtttataagaagatattacatctaccagctttttcagatgttcaacagtcgtaaagttcctggcaatatcgagcatttgcccgcgatacggcaagtcgggataatcgcggatggagagagcttccaaacgaaacggcttttcctgacctttcaacagggagagcaaggtttgcgtcccattgaatatgccatgtgaagtggaagctgaaatatttatcagcccgtttcccgtatcaatccgataatattcgccgttcactgctgtttcccgttccggcaaataatccagatgaactgttaccggtgcttcggatacaacttccaggccatggatggttgccagcttttctttcagtaattcagcttcgttggcaaaatcgggatggaaagtcagttttactttattttctatagcaaaaccctctttgccggtagccggcaccgcttctttcactgacggaaaaatatcagtttgctgcaactgggctgtagtctccaacgccaaattcgaagcatatatcttatcaggtgcgggataccagtcttctgtctccattcctttcagcggctgtatggtcagtccgacaggcaaggggataccttgcttactgcctgactgactcacccagtaagtgccttcgggagcatgtgacatttttttcaatccgttggtacaacagaatttgacggtcaacgaatctcccggagccagtggttgaaaattttctgccggatacatccggaagaagttcgcattcaccacttccactttgaccggagcagactcttcctgcagaatctcacgaggcagctgcgaataatagatgatccaatcctttcctaaaggaacatctgagatgttcttcaggacaaatgaattctcatagtaaccgggctgtacttccacagctcccatcttccaagtcaatgacacgggggctttcgccccgtcagtcgatttacaaccggaaatgaccagcaggaggcacagacttccccatattatatatagcatatttctcataggctttcctgtttttctatatatcattcttttaggtattaatcactcaatcgttcgatgtgcaaagtttctttgcctactccctgcgaggcgtcgaaagtcagacgataatagccgggaacgaaaccgtcgccactcgttattccattggaaccagatagttcaattccatccgtatcgccggacaatgaaccctcttgcagtagcatgcctttatctttattccattgcaaatcgctgtaaatttcaatttcgaaggattcccattcatgagtgttactcaaatacacggtggtctggtatttctgttcaccgattggcacaatatatcctaactgtgatatgtcttccaaattccagcctccactattatatgcttcattccagacgggtgcgcatgtaaatccgtgtcctaccagccagaagcaagtgggagccgtatcacccatccgtgccacccagatataattatacttagaagaataatagatctcccaggttcctgatttgcgcaagaaggtaaacttgccattatccggattatagctaaagaagtcgcgattgtaagcgtgttccacatcttcaaatccactcatttcgaactcttccccctgcgtaaagctaatctgtgcacggaaaaatccctcactggctatcaactcggtttctttaattttcaggttcttttggtagccgactactcccagttcaaaagtcatcacattgaaagtgatttgttcgacaaaccaatcccggtaatcaaaagcaaagctagggcccgacgcttcaataaggactgccgtattgcttgcttcggcagctccccaaatcagttttgcatcgtccaatgatgctgcggtagagatctttccggatagttccatcggataaccctcttccgaatcggaaacttccgtgaggtacaggtaaggattgtcctcactccggttcatttctaccacctcaccgttatagtgaagataaagcacttcgggaatctgcggacgggtgatatggaaatcaaatgtttgagtgacttcactaccttccacattaatggctgtcagaatcaccttcgcttcctgattctcttcaagtccggcttcaaacgggatataaatccctttttcaacaatcgagacatcagtgcctttcgtacggatcgactgcgaactgaccaaagtttcacctgtcatcaatttcacttccagcgtagacaaaggagtctgcggatcgtgaatcttcacagaaaaataaagagaatcggcagcaggtgtctgatcggtagttgagaattgcagttccgatatttcgggacacgaatatggatacgtcacccggccatcttcttcgctgcatgaagccagccaacaaacagtcagccccagcagccataaaaacagattattgtgtttcatcattttttcttttaaagttttacgttcctcttttcattaatagccttcattttgagtcagattggtgttcttatctttctctccttgaggaatcggccacaactgccgaaaagcctgcaaacctgcaaacagcaatctgccgtctttgtctttatgcttctgcatcacttccagcaaacgattattgcgtaccaggtcgaaccagcgctgaccttccatatacaactctaattggcgttcgttctctaccgccaggcgtcctctggcctgccccatattttcatctaaagaagaaggagcaaaaccggcacgctctctaatgctgtttacaatccggatggcttccggggtgcggtccaactctaccagtgcttcggctttcaacagcagtatatctgccaaccgcatcaaaatgatattggaagtcttctcgcgaatcttataagacaacgggtaactgtctgccggccaataggtatcataaggcactgatttccaaagaatactggatgcataacgggtatctttctctttgtcaaatttagcaaccagatcatgagtaggtgtacaataacgtcgccaggttactgatccgtcatcttctttcagcaatacccagtaagcccagttgggtgcatcggaggtgtaatagacttcaaagatgctttctgaagaaaatttcttatcgggttgccacaactcgtcaaaattgctgaccagcgtatagccttctgctattactttgtcacaagcctcaaccactttggtatagtcgcgtgttgatttctcccctctcgttgctaacactttggcacgtaaagcataggctgctcccttggttgcctggaaaattcctttattcttgcttaccaggtaacgaatggtattttcttcattcaggtcgtccaggatctggtcatatattttatctgtggcagaacgttccggatacatcaccggataccatttatcgaggttttcggctgtaatggtcggaatcaaatccagcaccatcggggcatcaccccataaacggacaatatcaaaatacgcccatgcccgcaagaacttggcttctgcaataacacgattacgttcttctgctacggtagaagtaggatccatcatcttcgtattttcaatcacactggttgcagtgcccgccatcgaataatactgtgaccagaccagttctactttataattggtagaggtcagtttcaacaaatcaaactcctgttcggccacaccatctccgccgatataacaattatcggactgcacatctccaatagtataattttccgactggaatatatctgctttaaaactctcatacgcaccctgcaactcggcctgtgcatctgccagacttccatatttagactcctgatcttccgttccggtaccttcctgcataaaatccgattgcggtttctcatctaggaaactactgcatgaaacgactaatgtacagagtacgacatacgctaactttattatgtttttcattttcgcagctattaaaattcaatattcaaaccaaaaattaccgccctcgattgaggataagtaccatagtccactccttgagcaacggagtctccgccaaaagcatttacttcaggatcgtatcctttgtattttgtcagtgtgaagagattctgtccggtgacgtaagcctgcaatctggacagatgtatcttattcaaccatttcttaggaaaattataggataaagtgactgttttcaggcgcagataagatccatcttctacaaaacgggaggagttatgattattctctgtattaccaacgcgggggacattggtaatcatacccggtcgtttccaacgatccaacacacgaaccgactggtttctaaagtctgtcatgccttccatatcaatacgcgatgcattaaaaatcttattgccctgacttccctgcaagaatacagacaggtcgaaaccggcatacgaaaatgtattcgtcataccgtaaatgaacttgggctgggcatttcccaaagtagtgcgatcttccggatcgataaaaccgttaccattcaagtcacgatagataatatctccggtttccggatcaacgccttctgatatgtaaccaaagaatgtgcctaacggaagaccttctttcaggatgacggctttctccttggattcgtacatttcagcataataataaactttattcaaaccgagcttcgtcagcttattccggttgaaagatatattgaaatcggtattccactgaaagttacctttaaaattctgggaagagagagtgaactccatacctttattcaccatctcaccgtcgtttcttgtcacactgctcggcaccacattctccggcaggctgactgtcaatagtaaatcggtggtctttttgtagtaagcatcaaccgagaaggataagcgggaatcaaacatggtcaggtcgagtcccagattccattggcttgttttttcccaggtcagttctttattggctgccgagccgggtttaatggcaagtcccggatataagtttccctccgaaacgggcagtttactgacgctcatggaagccatgtaagcgtagtttccaaaaccgccttggttaccattcataccccatccggcacgtaatttcaggtcggtaacaatgtcttgtaaaggttgcatgaacttttcgcctgaaattctccaacctgcagaaacagaagggaaagtaccccaacgatgtcccggggcaaaacgagaagaaccgtctgcacggaagttaaccgtcagcaaataacggctgtcgtaattgtaggctacacgacccagaaaagaggccagcgtccatgcggaagcagaagaaccgcaagcatccttatccagttgattggcggcactgatggaatgaatatcgggataagactctgccaggtcgaaacctgccatccacgaaccgttatattgtgcacgctgctgggtagcccctcccaaaatagaaaggttatgtttgttgaatgaacaatcataggtcagcaaattttcaaaaagccattcgaagtttcgtgagaaactctcttccacacgcccttttgtaccccgtccgtccgaagttgaaatcgggtccagatagtagtcccaatgttcattggtcagttcaatgccaaaagtggttttaaacttcagtcctttgagtatgtcaaccgtgaagccgagtgagccatttatatggtctgtattcgtgttactgtctgcggcattggcagccagcggattcagaatacgtgcaccgtaagcctgttcatcatattcgttcggatcatacggattccgcttctgcataaatggaggagtattcacaacggataagatggaaccggcacgcaaagaactacggctttcgttcacccattgtccgcctgtatgcgaatatgcaaaattgagtgccatctttagccatttggtctgctcactatccaggtttgcacggaaattataccgattgaaatgtgctttctccacgataccctgttcatcggaataacctccggaaacaaaatattgcagtttctcggtcccatttgccacagacaactgatagttctgattgacacccgtaccgaagaataaatcagtccagtccacatagcgcgtttcactttcggggatattgggggcaacatccgaaactgctttcaaatctttcatcaagtctttatattgttctgtattcaacgcatctatttttttccctaatttagagaaacccacataagcactcattttcacttgtggtgcaccgatctttcctcttttagtcgtaatcaacactactccgtttgccgcacgtgctccgtaaatagctgccgatgaggcatctttcagaatttgcatgctttcaatatcattcggactgatattcgaaatgtcatccgacggcaaaccgtccaccacatacaacggttcattggatgcctgtaccgaagtggctcctctcacccggattgtcactccggaacccggcatacccgacggctgtacaacctgaataccggctgcctttccctgaatagcctgtgcggctgtcataatcggacgttcttcaatatctgccgtggaaacgacagataccgcagtcgtaatatctttccgtttcataaaaccgtatcccactacgactacctcttccagtacctgcgaatcttcgctcaatgacacattgtatatgttctgcttattgaccgtatgagattgggaaacataaccgatataggagaaactgatttttgcccccacaggagcttccaaagagaaacgaccgtctatatcggtagcggttccaatattctctccctccactctcactgtgacaccaatcaagggttctcccctccggtcggccacaacaccggtgattgttttcttatcgcctttctggggggcgttctgttcacttttcagagtaagcaccacttgcttacccgattctattttataactaatagatgatcctttgaaaactttttctaaaaccgcatcaatactttcattactcactgtcaatgaaattttttgatctaatccgggaagcttatccgtataaaaaaagctgtaatcagccttcttttcaatcactcgtatcgtctggcgtatcgtctgattcttcacagagaaagtgatctgcgcacttgcctcttgagacacaaacaacaagatacaactgaacataacaagcctgaatatgatatgtaattgttttctcattagtaattagctttaaattctttaaaatataagtctgaaaattagactttttattatctttgtaaaatcgtgaagcaaaaaggattccctttcccttatccgcataaggaaaatttcttttttactatcatgtataaaccgtatttgatttcggggtggaattatgctgctacataattctaccctctttattttattatgaggtgtcttccataaattgtcctttttagttaatactacttcctattctcaccgtatctccttctaactcataggttaaaggataagtaaggcttataatgtaaaatacattatgcaagctactgttccggatggttccggaaaatagcacgttcttcagtttctcggagtcaaacacgactttcactccgtacatccgctccagcgtagtcgcgatctccgctaaagaggatgaattaaaaatcaacatattgttccgccaaaagtcgatttcacgcatatccgagattacagatttagtaaatgtctgcttgctcttatggtattctaccttttccccgggtttcaacaaggttacgtccgttttattagaaaccttgacgcttccttctgccagcagtgttgtgacagaatgatcgtcacaatagcctttcacatcaaaggtggttcccaacgcttctatctccagatcattgcagcagacgataaaacgtttatctttgtttttcgccacttcgaaataggcttctccgtccaaatagattttccggtcggatttgttgtactccgcatcataagaaagatgagtagccgaatttaaccagactttcgttccatcgggcaaagtcagattcgctttctgtccataatcgacagccaccatgaaagggtcctgtgacaccttattcatgtgttctaccccaaagtaagtggccagtcccaaacaaaccggtaataagatagtggctgccaccttatatataataggttgccagcgccgtttcttcggagatagtatcttgggctcatccagattcctctgcagatggttccacatttcttcttccactgtcttatcgatttcgacggctgcttctttccacatttgctcgcaaagcagattaaactcattacgaattccgggtttacgaatccattcaataagtatccttctttcttcagaagaggcctcctttttgaagaatttttccaatagtactatgtaatcgtgttgctccataattttcctgttctatttatactagtcttgagagacagaaaaggactacagagaaatcgaaatagttcagatattaacttttattaaaacttctatattagatatcatgtaagaagagagagactgaaaaggcaattattcccagtttgtcacgcaagaaatccaaagaacgatgtacctgtgtggcaacagtcttttccgagatattcaattggtcggctatctcacgatagttcaaccctgatttccagtaaagcataaaaacttcccggcgcgctggaggcagttcttctaaaagtttcaggatatattcttccaaaaacaaataatccagttcttcatctatctctacggattcgtcagatgactcattcgcaagcctgtctacataattttgaagcaggagttcgcgtcttacataatgatataccatgttttgggatattttaaaaagatagccgtcaaaattcccttccagatcgatattaagccgcttctcccagatatggagaaaaatatcttgtgtgatatctttcgccaccccggcattgctcaccatagaaaggacaaaattataaatgcgagcattgtatccacgatacaatgcctcaaaagcatttttatttccttctttcaataattgaagttgctgggtggtaatcattataaaataaggttaaatcatatatcgattcaaaaatagcgaaataactaaagccgacaaccaaagcacttgttaaaatttcaataaatcaatatcatagcatttaaaagggaatagaatacaaaaacacatccttgacatatcatatcataaattcagccattttgctataaaattaatagaaaatattaatcaacagctacaatttcgaacttttattcctacatttgcggtcaaatgataacttattaacaaatttcataaataccatggctaaaataacgaaagaagccgctttgctctatcattcacagggcaaacccggtaagattgaggtagtgcctaccaaaccttacagtacacaaaccgacttatcactcgcatattctcccggtgtagcagaaccttgtctcgaaattgagaagaatccgcaagatgcgtataaatatacggctaaaggtaatctggtagccgttatttccaacggtacagccgtactcggactgggtgatataggtgcattgagcggtaaacctgtaatggaaggtaaaggtctgcttttcaaaatttacgcgggcatcgacgttttcgacatcgaagtggatgaaaaagatccggagaaatttattgctgcagtaaaggctattgctcctactttcggaggtatcaacctggaagacatcaaagctcccgaatgttttgaaatcgaacgtcgcctgaaagaagaactggatatacctgtcatgcacgacgatcagcacggtactgctattatctccagtgccggtttggtgaatgccctgcaagtggccggaaagaaaatcgaagatgtaaaaatcgttgtgaacggtgcaggtgcatctgccgtatcttgtactaaattgtatgtgtcactgggtgcacgtctcgaaaacatcgtcatgctggatagtaaaggcgttatcagcaaggcgcgcacggatctgaacgaacagaaaagattttttgcaaccgaccgcacggatattcacacgctggaagaagcaatcaaaggtgcagatgtattcctcggcctgtcgaaaggaaatgtgttaagccaggatatggtgcgcagcatggctccgatgccgattgtgttcgcattggctaacccgacaccagaaatctcttacgaagatgccatggcagcacgtcctgacgtactgatggctaccggacgttccgactatccgaaccagattaataatgtaatcggtttcccgtatatcttccgcggtgctttggatactcacgctaaagctatcaacgaagagatgaagattgcagccgtacacgctatcgctaatctggcaaaacagccggtacccgatgtagttaatgcggcataccacgtgaacaacctctctttcggcgcggaatactttatcccgaaaccggtagatccacgcctcatcaccgaagtttcctgcgcagtggcaaaagctgctatggaaagcggagtggcccgcactgaaattaaagactgggatgcttactgtgttcacctgcgcgaattgatgggttatgaatccaaactgacccgccaactgtatgatacagcccgccgttcaccgcaacgtgtcgtatttgccgaaggtatccatccgaatatgctgaaagctgccgttgaagcgaaagccgaaggtatctgtcatcctatcttattaggaaacgacgaagctatcggaaaactggcagaagaaatggatcttagcctggaaggtattgaaatcgtcaatctccgtcacccggacgaatcggaacgccgcgaacgttactcacgcattcttgcagaaaaacgtgcacgcgaaggctttacttatgaagaagccaacgataaaatgttcgaacgcaactacttcggtatgatgatggtggagacaggagatgcggatgctttcatcaccggactttatacaagatatagcaatacgatcaaagtggccaaagaagtaatcggtatccaaccgggcttcaaacacttcggaacaatgcatatcctgaactccaagaaaggtacttacttcctggcagacacactgattaaccgccacccggatacggaaacattgattgacatcgctaaattgtctgataaaacagttcgcttcttcaatcacacgccggttatctcaatgttgtcatactccaacttcggtgctgatactgcaggtagccctgtgaaagtgcacgaagctgttgcccacatgcaggaagaatatccggaactggctattgacggtgaaatgcaggtaaactttgccatgaaccgcgaattgcgtgataccaaatatccgtttacccgcctgaaaggaaaagatgtaaatacattgattttcccgaacttgagttcagcaaacgccggttacaaactgttgcaggcaatggacccggatacggaattcatcggccctatccagatgggattgaacaaacctattcatttcaccgatttcgaaagctctgtccgcgacattgtcaatatcacagctgtagccgtgatcgacgccatcgttgacaaaaagaaaagaggaggtaaatgaaacgtccgttatccaaatcacaaatagtttgcatcagcctgctttggttggcgctttgctatctagttctgacaaaagccgaacgaattgacgggatgacggtggtaatgcttggcatttcggcagcattagtgtttattcctgtctataagtcgatcaaaaagaacaaataaatatcttttttcctatttttaatgcgataaaatatcaaatttgatgttttatcgcatttttctttataaaatgtttgctagttcaatttttatctttacttttgcaaccgaaaataaatatccgatgtacccatacgcagatgtgcaaatctgctatatagcacaaaagcacatagtcaaacggtatattagcaaattgtcaaattagcactttatttatatcaaccaattaaagaaaaaaaagattatgaatgcagcaaaggtattagacgatctgaaaagaagatttcccaatgaaccggagtatcatcaagcagtagaagaagtactttctactattgaagaagaatacaacaaacatccggagtttgataaagtaaacttgatcgaacgtttgtgtattcctgatagagtatatcagttccgtgtgacttggatggacgataaaggtaatattcagaccaatatgggttaccgtgttcagcataacaacgcaatcggcccttacaaaggcggtatccgtttccacgcatctgtgaacctttctatcttgaagttccttgcctttgaacaaacattcaaaaactcactgactactctgccaatgggtggtggtaaaggtggttccgacttctctcctcgtggaaagtcaaatgccgaagtaatgcgtttcgtacaggcattcatgctggaactgtggcgtcacatcggtcctgaaactgacgttcctgctggtgacatcggtgttggtggccgcgaagtaggtttcatgttcggtatgtataaaaaactggctcatgaatttaccggaacatttacaggtaaaggccgcgaattcggtggttcactgattcgtccggaagctacaggttacggtaacatctacttcctgatggaaatgttgaagagaaaaggaactgacttgaaaggtaaagtttgtctggtttctggttctggtaacgttgctcaatatacaatcgaaaaagtaatcgaactgggtggtaaagtagttacttgctctgactctgacggttatatctacgatccggacggtatcgaccgcgaaaaactggattatatcatggaactgaagaatctgtaccgtggccgtatccgtgaatacgcagaaaaatatggttgcaaatatgtagaaggagctaaaccttggggtgaaaaatgtgatatcgctcttccttctgctactcaaaatgaattgaacggtgaccacgctcgtcagttggtagcaaacggttgtatcgctgtatctgaaggagctaacatgccttctactccagaagctatcaaagtattccaggatgcaaaaatcctttatgctccgggtaaagctgctaacgccggtggtgtatcagtatcaggtcttgaaatgactcaaaactctatcaaattaagctggagcgctgaagaagtagacgaaaagctgaagagtatcatgaagaatatccacgaagcttgcgttcagtacggtacagaagctgacggatacgtaaactatgtgaagggtgctaacgtagccggattcatgaaggttgctaaagcaatgatggcacaaggtatcgtataatcagcaaaagatatataagctatagtttatttaaaagctcccgtcttccgtgaaggaagtgcgggagtttttttatgcaataaaaagatgtacgccccccgggtgtcagcacaataatctttgtagaaaaataaatagcagacaatacacacacaattcatagttattctctatctttagatagaaattatctgtttgacaagcgagcaaaagaagcctatctttgttatatattataaaccccggatgaaagaataaaaggaaacagtctgcttatacttgtatccgactaaaaaatctatttatggaaaagaaaaaacttactgcagcgaacggtcgtcctatcgctgacaatcaaaactcgcaaaccgcaggtcaacgcggacctgtaatgttacaagatccctggcttatagagaaacttgcccattttgatcgtgaagtaattcctgaaagacgtatgcacgctaaaggttcgggagcttacggtacgtttactgtcacccatgacattacaaagtacacccgtgctgctattttcagtaaagtcggaaaacaaacagaatgttttgtccgtttctccaccgtagccggagaacgtggagctgctgatgcagaacgtgacatccgtggttttgctatgaaattctatacggaagaaggtaactgggatttggtgggtaacaacactcctgtattcttcttacgtgatccgcttaaatttccggatctgaatcatgccatcaaacgagatccgaaaacaaatatgcgtagcccgaacagtaactgggacttctggacgcttttaccggaagcattacatcaagttactatcactatgagtccgcgtggtattccttattcatatcgccacatgcacggattcggcagtcatacttatagttttatcaatgcagaaaatcaacgtatttgggttaaattccatctgcgtaccttgcagggtatcaagaatctgacagaccaggaagcagaagcaatagttgctaaagatcgcgaatctcatcaacgtgatctcttcgagagcatcgaaaagggcgattatccgaaatggttattccagattcagttaatgacggaggaagaagcggacaactatcgtatcaacccgtttgacctgactaaagtatggccgcacaaagatttccctctacaagatgttggtgtccttgaactgaaccgcaacccggaaaattattttgctgaagtggaacaagctgctttcaacccgatgaatattgtagacggtatcggtctgtctcccgacaaaatgttacaaggtcgtttattctcttatggcgacgcacaacgttatcgtctaggggtgaatgcagaacaaattccggtcaacaaacctcgttgtcctttccacgcctatcatcgtgacggtgctatgcgcgtagacggtaattacggtgctaccaaaggatatgaaccgaacagttacggcgaatggcaggattctcctactatgaaagaaccgcctcttaaagttaccggtgaagtttacaactacaatgaacgggaatatgatgacgactattatagccaaccgggtgacttattccgactgatgccagctgaagaacaacaattattgttcgaaaatacagctcgcgccatgggagactccgaattgtttatcaaacaacgtcatgtgcgcaactgctacaaagccgatcctgcatatggaacaggagttgccaaagcgctgggtattgacttacaagaggctttgaaagaataatctgctatcactttcctctacaggtactccttcttcccaaagaaagagtacctgttttcttataccccataaggtataattcataaatctacaactaaatttataccctaaagggtgtaaaatagaaaatttacattatctttgtacccaaaagggtataatatgaacgataaatcattatcagaatacgtcaagcaaatgcgtaaagaacataacttgacccaagtagagctgtccgaaaaatcaggagtcgggttacgttttgtacgcgaactcgaacaggggaaacagactttgcgtcttgataaagtaaatcaagtgcttagtctctttggaacggaagtgggtgttgtaccaataagtaaattcaacaagctatgagacaagcactcatatacaaccaagaccagttggcaggattgcttacagaagatgaaaatggctatacctttcaatatgatacagcctacattaaatccagcgatgcggaatctatcagcctcacactgccaatctcggaaaagccatatacaagtctaatattattcccattctttgacggtcttattcctgaaggctggcttttagatattgctgaaaaaagttggaagataaatcgacgtgaccgtatgtcactactgcttgcctgttgcaaagattgtatcggtgcagttagtgtgattcccatcttaaataaagaataatgatgagcagatgcctatattgttatcaggaacttggcgagggagaaactgattttcaccctcaatgcggaaagaaaatatttgggagcaaaacagttcctctcctaccttatacaaaagcggatattaagcaacttgccgaacaagtcatacgctcacaaaccacacttacaggagtgcaagcaaaattgtctctcgatatatcatcgtcccccaaccaaccgcaacgctttactatcgttggtttatggggacgttatattctcaaaccgcaaacggaacaatttaaatacatgcctgaagttgaggatttaacgatgcatcttgccgaattggctaaagtgaacgttgtccctcattcattgattcgttttgccgatggcgaattggcctatatcactaaacgcatagatagaaccgcaaagggtgaaaagttgccaatggaggatatgtgccagctctcggaacgcctcacagagtataaatataagggttcttatgaaaagatagcaaagataattatgcaatattcctctgtgccaaaacttgacgtaataaatttctgggaacaagtcgttttctcatggctgaccggaaatgcggatatgcatctgaaaaacttttcactttatagtcagcgtaaaggctattattcactgaccccgggatatgacatgatctctacggcactcctcatgccggaggacactgaaaaattggctttgacactttatggaaaaagacgcaaaatcaagcgttctgattttgaagttgccatgaatagttgcagtttagagaaaaagatcatagacaacctattttctaaatttaccaaagttgccgaaaaatggttagagttcatagatatttctttcttgcccaaagaaatgaagcaacagtacaagttgattataacaaggaagttagatttattataaaaacagtgcggggatttaaaaaggaataattcatttataacattaattttaaaaaggcgctaattttattgaattacttaagtgatgaagtactgcatttcaaaaaagaaacttaactttgcaaccaagttttataaaagagactgaattagtaaactaaaaaggaaaatcaaatgaaaattaagactttaatagcctatttcatctttacatgtgcaatatcttcctgcatacaggatgaagcattaaattcagaagcagccattgatgtttgttcaggcgatgatgtgcaattggcaaatatcgatgcagattctaaagtaatcaatgtatatgtaaataaaggagccgacctttccaaacaaaaattagaatttacacttccacaaggagctacaattaaagtaaatactccaataactggagatactgaatctacctatgatttcagcgaagaaccgcactcccgtaaatttactgttacatcagaagacggtcaatggcagcctgtttataccgttaatgtgattttagcggaattacctacccttttcaaatttgaagaattactgacaacctccagtgaatacgatacattttacgaatttacacctgcaacctcacaagaaatatctaaagtattacaatggtcaagcggtaatcccggttttaaattaacgggtatggctaattctagaatagattacccaacagtacaagttgcaaatggttttaaaggtaaggctgtaaagctagaaactcgtaatactggagattttggtgcaatggtaaaaatgtatattgctgctggaaatttatttatcgggacatttgaagtagaaaatgcactgacaaatcctagaaaagcaacgaactttggttttcaattttataaacatcccatagcacttaaaggatattataaatttaaagctggggaagtttattctgtagaaggacagccacaaaccggaaaaagggacaaatgtgatatttatgctgttatgtatgaggcagaaaataattctatcatgcttaatggtgataacgtatttaactctgataaattggtattattagcacgaatagaacctgaagatattgttgaatcagatgaatggaatgagtttactatacatttcgaatcagtaaaaggacgagaaattgacgatacgaaactacaaaacggtaaatataaattaggtattgtactatcatccagcgtagatggcgcctattttagaggagctgtcggtagcactctatacgttgatgagctagaacttatttgtaaagaataaataaaactaacacaatgaaaaaatatcaatcaatcaatatcatagttgtgctgctatttgtaagcatattcacagctcaagcacaggaagaaagaaaccaaggtatcatctggtcttatttacatggatgggaatatggaataaaagccggtttcaatattggtggaacttcaccattacctctaccaaaagaaatccgtaaaattgatagttatgcaccaggaatcgcaatttcaattgaaggtaatgcgacgaagtggttcgatcccaaatgggggatgactgtaggagtgcgacttgaaaataagaatatgaccaccgaagctaccgtaaaaaattacggtatgaaaattatcaacaccaatggtggagaattacaaggattatggacaggaggagtaaagaccaaagttaaaaactcatatctgacaattccggtggttgctaactataagataagcaagcgttggaaattgtctgcaggtccatacatatcatacctcatcgaaggaggattctccggacatgtatacaacggtcatttacgtaccccggaccaaacaggttcacgagttgttttctctggggaaagcatagctacctatgatttttccgaaaatctccgaaaatttcaatggggactacaactaggcggcgaatggagagcatttaaacatctaaatgtatacgctgacttaacgtgggggatgaatgatattttcaaaaaagattttgatacaatctcatttgccatgtatcctatttatttgaacgtgggatttggatatgcattttagcatattgttttatactaaacgatccagaatattgtgtcaatagaaaactacgggaattcttctcgtagttttttatttatgtatgggctaaatcaataaatacagggtagtatcgtaagcgtctctgcgtttctataccaccaaaaagcgggtatctctcatcaataaaatagtccaataaggttcaaacaggcgtaagatggcttgtttttgttgcaatgaatctatataaatccggcttgtatggcttaataatcccactttgatagccagggctgtacagcctacatatgtaggctataaaaagattaccgtttccaatgtattatttagctgccaaatacaagttatcatcctataaagtgaatattcttgtggcttcatatgggtgtttttccatgatactacactaaagcggatgcagtaggggtatgatagatacctgtttgagaaatcatctatcacacttatcttattgaaaattagcttaatataaaaataaatgatagtatggtaaatatttttcactatgtagtatttgctgagttcaaattcattgaaactttatatccggagttattctatagtgaacaaattcttttctgtatcgtatattgaatgacattttgggtatgattgccataaacaaataattattctccctcactacaaaaaaattccccactgtccaaaaacagtaagggaaatttatttaatatttatttgatatatatacaggattttacagaaaaacgaggatatcctcatagacaccctcgtttatacaataaacacacattaaatgtatgccaacttatattataacaatcttattcacatattacttcaaattcatccacaatcaaagtactaccaccagcacctttaaataaatcaccatctttacttgaagagcaaactatagcaaatttatattttgcatttcgatcatactcttgtaaatattcaaattcaatgttaaaaggagtatattctttaatatcctcaacgataatattagcaacagcaactcttaattccgaagtgttcacatcgtgacctgtcaatacaatctctttaccatcctcgcctgtttgcactttatacaatacggcttgaatctgtcctttatctttaatatcaaccggttttacatcttcataattagaagcatcaagataattagaacctgattcatatttataaacacccttaaaacaaagcggttttccacctaaactaactgtttctgcatcaagaccaaatttagtacaactcaacctatcaccttgtaaagcaggcatcatatcaaatttaccaataaaaatagaaccggcagtaatcttcggaactaatgaatttggctcatttggatattcaaaagttatcagtttagccgcatacgtaccatcctctctagtttcctttctcaacaaagtaccacctaaaataccagctccagcagcacttcctgcccacaaatctttgggtaacagttcatcattcttactaccttccttccagtcttcaaaagaatatttcaataccttacgagtaccttccacaaaagctgtataaactttcacggtgccatcttccgccgtcacagtataagtcactttcttattattcgagaagtcctgtgctacgccggaagccggagtaatagttgctccttcagatatttcaataataggagtaaactttaaagattctacttcctcattaacagcaaaaacaatcgtaccagcttcttcatttataactggttgttctactactgcctcatcgtcaataataaaacttgttattttagcctccgaactttcactacctgtcaatttacgaccaacaaaagtagcctttacattttgatttaaaggagcaccaacctttacacctatttcaatattaatattgctacctttcacagtaccagaaatactaacagggcaattaccaagtggctgtaccaaatctagattctgttgaccttcaaaagcataaccactatctatagctttcacagtgcaaggatcaacttcaatatcaccaacatttaccaaaaaagtaaaattcttcaatgataatgcaatttggttagttcccttattagactgtgaaattgtgattttttgattttcggtagttcccatttgattaccatccacatttacagacagattaccaacatagcctccagccaattctgtatctatcggatatttcacttcatcgtcatcatcactacaactcatgaatatgctaacagaacaaacaagcataaacaagtacaataaactcttcttcataattctcataattaattaataatctatttgatcacaaaaacgagtgcaaagtaacaactttataataattcacacaaggtcaattctttgtattttatgttctatttttaagattataagaccatatttcctgtctatatagacttttttaaggttaatattcacactatacggtatgctacggaagatttaaatcatattttaatttagttaaaaagaccaacggtcagaaaatagaatcttatcaattccaacacataaaaaaacgatcctcctagtacttccaaaatttgtttcacattaaattattgcgagttccacttaaaaaggcatcaacactactcccagcttcttctttccatccatcttgaccaccatcggtttctcaaagcgaacatgacgaagatatttcgtttcttccaccgcaggttgcgcattgaggaagtcctgattatacacaccatcattcataaaggcgttaatagtaaaatatccaactccaaatgaagtcaaattttggaaaaagtgtgtcccttgacttggatctacccgataattagtcaatccggcttccacaatcacacgggcagccgaaatatgcggccacttcacagggatgccgagccaagtatcgctgcttccccaacgtcccggaccgacaagcacataattctttccttcattcaagaattgttggttaatcttttctatctcccaggcaattgtctgattgttggaggcactataattatcggtctttacatagaccacatcataaatatcattcatgataccatgtcccaatgaattatatgagcggagaatcacatcttcatccggtatctcgttcaaatcctcatccagcatttctttactgtctacgataggacggatctgcaacagatagaaagttccggatttatcatgttcgcgacttaacgttgctgcaaattcaatttcaaccggacggcgcatctcctgttcaccatatttcaatactaactgcagaatacgagctaacggaaaaacatcatgttgcaggatattagcaaaagtaatcaccttacgtcctcccggatataaaccatcacgaatgatctgatcgtacggatcgtaggtagaagcaatataacgcagagcaccgtcactttctgcctctttgacatgaagtttcagcaaattaaaaccatcgtcgatagaaaaatcatgtccggcatttttcaaatccaatgcatagaaacgggtttgagtctccttgagagcaatttccatttcgctggtctgtaacacctgattaggatgataaggagaaaaacgaagggtcatgccaccgtcaacaatatattttcctaatcccaaagccagattcaccgttccctcttctgccttttcattccccaacggataataattgagcgagcgtgccacaccggacatggaaggataataacggtcaccatactgattgccaactacttcctgtaagataacagccattttctcctgatcgattacattcgacgtagcttgcatatacgctttgctgtcacggaaataaaccgaagcatacacccctttgatggcatcggaaagcatccgcaacatttcatagcggtcgtccagataaggaatcatgtaagtgttgtaaattccggcaaacggttgatagtgagaatcctccaacaaggaagaagaccgaatggcaatcggagacttcacgacatcgaagaaagtgaaaaagtcctctatcaaccggtccggtaatttagccttcaggaagtatttcaaaatcgtagcatcatccgcatccgacagtgcaatctgatacaagttgttggtgtccatgaactcatcaaagacatccgtacaaagcaccactgttttaggaatagcaatacgcgcattttcaaactcgtcaaactccggatgacgcttcaccatattatcaataaatgccagtccacgcccttttcctccgagagagccatccccgatacgggcaaagttagaataacggtcgaagcgatcgcgcttaaagaccgccacaactccctggttcttcatcttacgatatttcacaatcgcctcaaagatgattttacggtgagcatccacatcctgaagactattccaggttatcggtttcaaaaattcagccaccgggaacatggcacgtgaataaaaccaacgcgacacgtgattcctgctgatatgatataagaaagattccgcaggtacggcaaaaagaatgttttgcagctccttcaaattccggacgcgggcaatctcctccccggtatccggattgcggaaaataaaatcaccaaaaccaaaattatcggagacgatacggcgcaaatcaacgtccatcttcttggagttcttatcgataaagctagcaccatacttgactgcataagacgaattttcagattcggaagactgaataatcaaaggaacaaacggatcattcttacgtatctccgcacacagcttgatacctgccagaccgtctttctctccccgttccactttcgggaaacggacgtcagtgattacccccaatatattattctgatacttatgatagatctccatcgcctcctgatacgtacgtgccaacactattttaggacgtccgcgcatacggagcgtacgctggtgtgcattcaaggcttcggtagagaattcctgactctgcttcaacacgaacttatacagattcggcaaaatggaagaatagaaacgaatgccatcttccaccaaaagaatcagctgcacaccgacctcctgtacatcgtgttccagattcatcttgtcctctatcaacttaatgatagacaccaacaggtcggtattacccaaccagcagaacacatattcgaacgcacttaaatcttcattgataatccgtttggtaataccatggctaaaaggagtcagtatgacgataggaatatgctcgtatttctctttgatgtgacggccgatatcgaaactgtcattatcccccgtgctcggcatacaaatcaccaggtcgaacgacatattttccaactgtgacaatgcttcctcctccgtagatacctgcgagaaacgaggtggatagcgcagagacaaagaagtgtattcattgaaaatcttctcatcaatgcgcccgtcatcctccaacatgaaagcatcgtaaggattagcgattaataacacgttaaaaatccgccttgtcatcaagttagcgaattgcgtatctttgaagtaaagctggtttaatttatatttactaagcataaagtcattctcctttcttatttcaaatcgtctatctgcagaatcacattttgcaaagttaattctttaaatctcattttccaccatcttctttataaagtttacttgtttatctcttattattttgtagatttgtaactttaagtttattcaaaaagactttttattcacatgaaaaaagtaactttattaatgagtggaatcatggtgatgtcatgcgctccccaacagaaaaagctagtctaccccgagacggcaaaggtagacaccgtagacgtgtacttcggtacacaagttcccgacccttacagatggctggaaaatgacaccagtgcagctactactgcctgggtagaagcacaaaacaaagtaacgaatgagtatctaagtcagattccattccgggaaaacttgttgaaacgattgaccacactggccgattacgagaagatcagtgcgccaatcaagaaacatggcaaatattacttcagtaaaaatgatggcctgcaaaaccagagtgtattctacgtacaggattcactggacggcgagcctcgcgttttcctcgacccgaacaagctctcggacgatggcacagtggcactgaccggtctttacttctcaaacgacggcaaatataccgcttacagtatctcacgcagcggatcggattggtctgaaatatttgtcatggacactgaaagtggcaagttattggaagagcacatcgaatgggccaaatttaccggtgccgcctggcagggagacggcttctactacagcgcctacgatgctcccgccaaaggaaaagaattctccaacgtaaacgaaaagcacaaaatctattatcacaaaataggtgaaccgcaatcgaaagataaactgatttatcagaatccggcttatccgaaacgtttctatacagccagcaccagcgaagacgaacgtattctcttcctcacagaatccggtgccggaagaggcaacaacttatttataagggacctgaaaaagccgaattctccttttatccaactgactaccgaccttgactaccaatactacccgattgaagtgatcggcgatcagatgtatatttatactaactatggcgcaccgaaaaaccggatcatggtagccgacatcaaccgtccgaaactggaggactggaaagaactcgttcccgaatcggaagccgttctttcaaacgcagaagtgatcggtggcaaactgttccttacttacgacaaagatgcttcgaaccatgcatacgtttacggcctcgacggcaaacaaattcaggagattcaactgccgtcactcggttccgtaggctttagcggcaacaaagacgataaagaatgtttctttggattcacttcattcaccattccgggtgccacttacaaatatgatatggaccagaacacctacgaactataccgtgcaccgaaagtacagttcaactcggatgattttgtgacggaacaagtattctttgccagcaaagacggtgtaaaagtcccgatgttccttacctataagaaagatctgaagaaagacggcaaaaatcctgtattcctctacggatacggtggtttcggcatcagcctcaacccgggtttcagtgcaatgcgcatcccattcctcgaaaatggcggtatctacgcacaagtcaacctgcgtggtggcagcgaatacggtgaagactggcacgtagccggaactaagatgcagaagcagaatgtattcgacgacttcatctctgctgccgaatatcttatcaacgaaaaatatacgaataaagacaaaatcgccattgtaggtggctccaacggtggtctgctggtaggtgcctgcatgacacagcgtccggacctgttccgtgtagcaattccgcaggtaggcgtgatggatatgcttcgctatcataaatttactatcggttggaactgggcaagcgattacggaacaagcgaagacagcaaagaaatgtttgaatacctcaaaggctattctccattgcacaacctgaaaccgggcacgaaatatccggcaacactagtgaccactgccgaccatgacgaccgtgtggttcccgcccattcattcaagtttgccgctacgctgcaagcagacaacgacggtacaaacccgacactaatccgcatcgacagcaaagcaggtcacggtgcaggcaaaccgatggcaaaagtacttgaagaacaggcagacatttacggtttcatcatgtacaatttggacatgaagccggattttaagaagtaaaaagtacaaagtattaaattcaggtatcaagtattaagtattagcactgaatacttgatacctaatgctttttctactatcattttatcattatttaatcaaaataatggcataaaatcaatcacatctgaaaaattttcctatatttgcagtgagttagttgacattttatcagaattaaccttttaaaatatagtatcatgaacatccagaaaatcatgtcctctttggaggctaagcatcccggtgaatctgaatatcttcaggcagtgaaggaagttcttctttctatcgaagatatatacaatcaacatcctgaatttgaaaaagctaaaatcatagaaagattggtagaacctgatcgtatcttcactttccgtgtgacgtgggtggatgataaaggtgaggtgcagaccaacctcggttatcgtgtacaattcaataatgcgataggcccatataaaggtggtatccgttttcatgcatccgttaatctttccattttgaagttcctcggtttcgaacaaacattcaagaatgcactgactaccttgcctatgggtggcggtaaaggcggttccgatttctctccacgcggaaagagtgatgctgaaatcatgcgtttctgccaggcatttatgctggagttgtggcgtcatctcggaccggacatggatgtgcctgccggtgacatcggcgtaggaggacgtgaagtgggctatatgttcggcatgtacaagaaactgactcgtgaatttaccggtacattcactggtaaaggattagaattcggcggttcattgattcgtccggaagctactggttttggaggactgtattttgtcaatcagatgcttcaggcaaaagggattgatataaaaggtaagacagtagccatctccggtttcggcaacgttgcctggggagcagctactaaagctaccgaactgggtgcaaaagtgattacgatttccggtccggacggatatatctacgatccggatggtatcagcggcgagaagatagactatatgctcgaacttcgttcttcgggtaacgatattgtggctccttatgctgaacagtatccgaacgcaaccttcgtagaaggaaaacgcccgtgggaagtgaaagcagacatcgcacttccttgcgccacccagaacgaattaaatggagaagatgctcaaaatctcataaaaaatgacgtactttgcgtcggagaaatttccaatatgggatgtacccctgaagctatcgatcttttcattgaacataagacgatgtacgctccgggtaaagcggtcaacgcaggtggtgtagccacttccggcttggaaatgtctcaaaacgcaatgcaccttagctggagtgctgccgaagtggacgaaaaactccatgcaatcatgcacggcatccatgcacaatgcgtgaaatacggcacggaacccgacggatacattaattatgtgaagggtgccaacattgccggatttatgaaagtagctcacgcaatgatggggcaaggcgttatttagaagactttgtttagttgtatttgtatttgtggtttgcgctgctcgtctcctgtgacaggacgcgggtagcgctatttttttgagattaacattattttcgctggaattaattatctttgtagcatgataggttaaataatagtttgtgaatttgttatatgcgataaacaactcacaactaataatttaccattattggttttgtaattaataatcaagtaataaataaaaaatgctacaacccgaattgaaatttcgccgtgacaaaattcgcagtctgatggtgtcgcagggcattgacgccgcacttatcacgtgtaatgcaaatttaatttacacgtatggctgtgtagtcagtggctatctttacctcccccttcattcgcctgcactattattttttaaacgtcctaataacatcacaggagagcactcattctctatccgcaaaccggaacaaattgttgatctgctgaaagaacaaggattaccgatgccaaccaaactgatgttagaaggtgacgaacttccttatacggaatattgtcgtctggccggtctcttcccggaagcggaagtggtaaatggtaccccgttgattcgccaggcacgcagcgtgaaaacacctgtagaaattgaaatgttccgccgctccggcattgctcatgcaaaggcttatgagcagattccaggtgtttatcgtcccggtatgacggatattgaattttccatcgaaatagaacgcctgatgcgcctgcaaggttgcctcggaattttccgggtattcggacgcagtatggaaatattcatgggtagcgtactgaccggagataatgccggttacccctctccttatgattttgccttaggcggtcagggacttgatcctgccttgccgggaggagcaaataaaactccgttaaaagagggacaaagcgttatggtggacttaggtggcaacttcaacggttacatgaacgatatgagccgtgtattctccatcggcaaactgcccgaagaagcttacaccgcccatcaggtttgtctggatatccaagaaaaaattgcttccattgccagaccgggtattgcctgtgaagtgctttacgacacagcagtcgaagtggtcaaagcagccggatttgccgacaaatttatgggaacaggacaacaagccaaatttatcggtcacggcatcgggcttgaaattaacgaagctccggtactggctccccgcataaagcaacaattagaaccgggtatggtctttgccctcgaaccgaaaatcgttattccgggtgtaggtcccgtaggtatcgagaactcttgggtagtgaccaacgaaggaatagaaaaactgacgaactgcaatgaagaaatcattgaattaagttaaacagacgatgaaaaagatgtgtccggcaaagaacaggcacatctttttctactaataataacacacttaacccccaaaaccaatgaaacaacctttcattctaacccttgtatcctctgttgcctgtgctgcaacagccgccaataaagcaccggaaaacaccacaccgacaaagtcaaaaacacccaacgttgtatttatctacgccgacgatctcggctacggcgatctggaatgttacggagctaaaaacgtacagacacccaacgtcaaccgactggcaaaatcgggaatccttttcaccaatgctcacgcaacagccgccaccagcaccccttcccgctactccatgctaaccggagaatacgcatggcgcaaagaaggaacggatgtagcggcaggaaatgccggaatgattatccgtcccgaacaatacaccatggcagatatgttcaaaagtgtcggttacaccactgccgcagtaggcaaatggcatctgggactcggagatcaaaccgccactcaagactggaatgctccgttaccgtgcgcactgggcgatttaggtttcgactatcattacattatggcagccacagccgaccgtgtaccctgtgtatacatcgaaaacgggaaagtagccaactatgatccgagtgctcccatcgaagtcagttatcaaaagaacttcgagggtgaacctaccggaaaaagtaatcctgaattactttataacctcaagccaagtcacggtcacgacatgtcgatcgttaatggaatttcacgcatcggttttatgaaaggcggtggaaaggcgctctggaaagacgaaaacattgctgattcacttaccacacacgccattcaattcatcgaggaaaaccaaaacaaacctttctttctctactttgccaccaatgacgtacatgtgccccgctttcctcacgaccgtttcagaggaaaaaatccgatgggattaagaggcgatgctatcgtacagttcgattattgtgtcggtgaaatcctgaatacactcgaaaaactgggattaagagaaaatacactcattattctttcaagtgacaacggcccggtagtagacgacggatacgatgacaaagcagaagaactactcaacggtcatagtcctgcgggaccactacggggcaacaaatatagtgcctttgaaggaggaacccgtattcctgccatcgtcagctggcctgcaggagtaaaaaaaggaatgacttcagacttattggtttcacaagtggactggctcgcctctctcgcttccctgaccggagctacgatgcctaagaataccgcaccggatagttacaactatctgggaagttggctgagtaaagaaaagacagaccgcccgtgggtaatagagcaggcttctaatcacacgctttctgtccgcaccaaagactggaaatacatcgaaccgaatgacggaccgaaaatgattcaatggggaccgaagatagaaaccggaaactctaaagaaccccagctttataagatgaaagaagtgaaagaggtaaccaactatgcaaagaatatgccggagaaagtggcagaactgcaaagtatccttcaaagcgtacgcgaaggaaaggacttaatcgggaaataattccagatatgaaacactgaaacgcttttattttaatgacaacaatatcatgaattatcaatcaatcccgttgataggcagtgccctgctcctatctaccctatctgccaacggacagaaaaaaaatacccagcccaatatcctcttcatcctttgtgacgatatgggatatggagacttaggatgctacggtcaaccatttatccgtacccctcatatagacgccatggccggtgaaggaatgcgttttacgcaagcatacgcaggaagtcccgtcagcgccccttccagagcttcattcatgacaggacaacattcaggccattgtgaagtacgaggtaacaaggagtactggaaaaatgcaccgatcgtggaatatggacagaataaagaatactcaatagtggggcaacacccttatgatcccgaccacgtaatcctgccggagataatgaaagataacggctataccacaggtatgttcggtaaatgggccggaggttacgaaggttcctgttccactcccgacaaacgggggatagacgaatactacggttatatctgtcagtttcaggctcatctttattatcccaatttcctgaaccgttatagtaaagcgttgggtgacaccggagtggtacgtgtagtgatggatgaaaacatccaatatccgatgtatggtcccgactacctgaaacgtccgcaatattcggccgacatgattcaccagaaagcattggagtggctggatcagcaagacggcaaacaaccgtttttcggcgtattgacttacaccttacctcatgcggaactcgttcagccggaagattctatcctgaatgaatacaaagctaaattcaacccggataaagaatttaagggaagcgaaggctcacgatacaacgccatcacgcatacacacgcccaatttgccggaatgattacccgcctggactattacgtgggcgaagttttgaaaaaactgaaagaaaaaggactggacgaaaacacattggttattttctccagtgacaacggccctcacgaggaaggcggagctgatcctactttcttcggcagagacggaaaactacgcggactgaaacgtcaatgccacgaaggaggaatacgtattccatttatcgcccgttggccgggacacatacctgcaggcgaagtaaacgatcacatctgtgcattttatgatttaatgccgacgttctgcgaagttattggtatcaaagactacgaaaagaaataccgcaataaggaaaaagaagtcgattatttcgatgggatttctttcgcccccacactcctgggtaataaaaagcaaaagaagcatgattttctgtattgggaatttgatgaaacagaccagattgccgtacgcatggatgattggaaaatggtagtgaaaaaaggaacaccgttcctctataatctaaaaacagatattcatgaggatcatgacataacactccaacatccggatatcgtggaaaagatgaaggctatcatctttgaacaacatactccgaatcctcatttttcggtaacgttgcccaaacgataaacacacagataaagaaataatgagtaatcagtagttggaaagcaagttatcattcattccgatgtggttttgaggaaaatacagattttcgaaactccatccaatagaatgattatatttgcattttgattataagtaataaattacgaaccactaatcagtaaacaatgaaattcagcaatgtaagattattagtaaacgacttcgccaaatgcttcaaattctacaccgaacaactcggattggaaccagcctggggagatgcaaccagcggctacgccagctttaaagtagccgacggaatagaaggcttagccctttttgtatccgactggatggcaccttcagcaggcaatgcagataagcagcaacctgttgggatgcgcgaaaaatcaatgatctccttcagtgtagataacgtagacgaaacctttgccgctctaaaagcaaaaggcgtgacatttattaatgaacctacagatatgtccgattgggggatgcgtaccgtgtacctgcgcgatcccgaagaaaatctgatagaactctttactcctctgtcacgggagcaatatagccaggaactcctcgaagaagataagaaatttcaataagagatattgctaacagaaacgtgcccatacaagtgagccggaaaagacattcaataagccccatagtgacatcactatggggcttatacgttcacttggcatcccactcaatactgccttgttttactccaattcaactactgattcgcataaatcagtgtctgaatactataggattacgatgcctgattttatatatgttccgtccttctatcagcgaataggcgtcattcccatcttctttgcccgttccagcatgaaagcatgagccgcctcatattcattcggaatcactccatccaagattgcatctttgatagcactcttcaagactccgacctcacgacaaggttccaagccgaaaatctccataatttcttctccgctcacaggtggctggaaattacggacacggtctttctcttccaaatccttcagtttctgtcgaaccaactggaaattattcaggaaacgctgtttacgttccatattcttggaagtaatatccgcttcacaaagcatcatcaagtcgtcaatgtcatcacccgcttcgaagagcagacggcgtacagccgagtctgtcaccacatcatctgcgataacgatcgggcgcatgtgcaggctgaccagcttttgtacatacttcatcttctcattcatcggcaacttcatcttacggaagatatgcggaatcatcttttcaccgataaagttatgattatggaacgtccatcccgctttaggttcccaacgcttcgtggcaggtttggcaatgtcgtgcaacaaagcagcccaacgcagccaaaggttatcagtcttcttgctgatattatccagcacttccaacgtatgataaaaattatccttatgggaacgtccgttccgtgtttccacaccctgcaaggcggcaaattccggaaaaatcaacgacagcaaaccgctacgctccaaatcaataaatccttttgaggggattggagaaagaataatcttattcaattcgtccgcaatacgttcacgggatataatttcaatccgttccttattccggcaaagcgattcgaaagtatcatcgtcaatgtaaaaacccaattgcgtagcaaaacggatgcaacgcatcatgcgcaagggatcatcgctgaaagtaatatccgggtcgaggggagtgcggattgtcttttccttcatatcctccaaacctccaaacggatctaccaattcaccaaaacgtgctttattgagacatacggccagagcattgatcgtgaaatcgcgacgattctgatcgtcttccagcgtgccgtcttcaacaataggtttacgcgaatcccgttgataagattctttacgtgcaccaacaaactctacttccgtgcctctatattttacttgtgctgttccgaaattcttgaaaacagaaacatgagcaccacgtcccaactgttttccaagggcttccgccattgcaattccacttcctacaactactacatctatatctttagagggacgttgcagaaaaatatcacgaacataaccacctaccacataacactccataccgagtgtatcagccgtttcggctatctgtccgaagatgggttcgctaaaatgctgcttcaattcctcttgagtcaactctatcattctttttagttataagttttgaggggacaaaattacaaaaataagggatatatttgtatttttgccgctaataaaaccagtaaatagaatttgtgatgaaaaaactgattatcctcttttgtggtacgctggcattagctgcctgcggaaatggccttgagaaaaaagccaatgaaaaactgatggttgccaaggctgcctacgaacgtggcgactatgaagaagctaagttacaaattgacagtatcaagattctctatcccaaagcgttcgaagcacgtaaggcgggacaggcactgatgctcgatgttgaaacaaaagcacaacaaaaaacgcttgcttacctggatagcgcctttcaggcaaagacagaagaattcaatgccatcaaggacaaattcaaactagaaaaagatgccgaatatcaacaagtcggcaactacctctggcctacacagaccattgaaaaaaatatgcaccgttcgtacctccgcttccaagtgaacgagcaaggtataatgagtatgacttccatctactgtggtgccggcaatattcaccatacaaaagtgaaagtgattgctcctgacggtagttttgcagaaactccaagctccaaagacagctacgagacaacggacatgaacgagaaaatagaaaaagctgactacaaactaggggaagacggaaatgtgatcgaattcctgaatctcaataaagacaaaaatatccgtgtggaatatataggcgaccgcacctataaaacgacaatgagtccaaccgaccgccaggccgcagcaggtgtttacgaattagcacaaatcctctcggccatggaacagattaaaaaagaacaagaggaagccaacctgaaaatcggattcatcaataagaagaaagaacggaaagcacaggaagaaattaccgattagtaaaaggaaagccatccaccagaaaaagccattggttaataataaaatagacgggaatagttgttatttttcataaacgacaactattcccgtcaaatgcataatgagactcttaatcctctgcgtgagagaaaaggcgtttcctggtagggagaaaaggcgtagtctgccatcatcaaacggcgtagcctgataaccaaaaacggcgtggtctacacgcctttattttatccttctattcaactgattattagccttttcctgctttgattttccgacccgttttccggtcgtcttctttttaccgactgcagactttgtctttccggcaaaaggattgttactttttttgattaacatagacagcacttatataaacagtacttatttcttataattcttattctccttcgtaatactcacccaaaaaccagcgagccacaaaatcccagttttcctgcaataactcctttccgttctcaaacgggaactgtgcttccggcaacaaatcgtgttccattccatatttcagcagatcgaacggacacaaaccttcttcacaaaacagctcgtatgcttcctcttcagccagttcggcattgtagagcggattacgtttgtctgcaaaatattcggctacatcaggaccgatcaacaaccctttcggattggcaaaaaccacaaagttaccgaactcctttaagtcaggcaacaaagaatcctcttcatcttcccacttcaacgactgcacaaagaaaaattttagcgcttcgtaagagtcaaagtataaaagcggttcacctttgctcgcttcaaggaaacgttctacgttcgtaggcatcttttctcccggcaaagctaccggcagaggcatccgcttcttttgcatcagctccgtttccatcagccagtccgttgccagataatcgctgataggagccaattcgaacgcagcatccaaacggttgtaaagcgtatccgcaaactccagcaaatccgcatccatcgggttctctactccatcaaaatcatcgccaaccggagaattgatggcccacaaaaggaaaacaatatcttcacggttaatttcgtccggcaaatattcctccgtcagtgcgtaaaaaggcaaataacgtccgtagcttttccggtgccaatgaataaactgacgccaatttcctccgtctgctacgcaatcttccaaatacaaggcacacgtcaaagccactcgcttctggtcttcctcccactctctcccaccgtatataaaagaatctgccaccaacggcaatagctggttagcgaaatccagataccattcatccgtatccactgcttttgcacgaccatgagcgtccagccatgctttcatatatatcttctgttgcttcatactacaaacgtttcaaagccagtttgataaccttttctaccggagcatccggctcctccttcaagatagccaacaccaccttctgtgaaggtgcagcagcaaagcctagcatcgtcaatgcagacaccgcctcttcctgcacttccgcattggcaggttgcaacaacaaacctgcggaagcccctccggcagcagacatacccattgtttttatcttatctttcaggtcgacaatcacgcgttgcgcagtcttcagcccgatgcctttcaccgttttcaacatgttcgcattttcggtgctgattacgttcaccagttcggcaggcgagagagccgaaagaatcatacgagccgtgttccccccgattccggaaacggaaatcaataataggaaaatctcccgttcctgtttctcggcaaatccgtagagcacatacgcatcttcacgaatcgcctcgtaaatatatagcttacaacttttctttccctgaatagccgaataggtattcaaagatatattggcggcatatcccaccccattacagtcgatcactgcggttgccggacttagttcggcaagttcgcctctaatatattctatcataacagggacaaagataaaactttctcaccacagattacactgattttcacagattattcttttgtacattagatatgaagaatatgaaaaaaataaaaatattaaagcagatgaaccaaagttagtagtaatttgtttacttttgcaagcaaaagaaagaaatttgttcattaaaaccaagaaaagaatgaaaaaagtaagagctgccatcgttggttatggcaacattggacattatgtacttgaagcgcttcaggcggcacctgatttcgaaatagccggagtcgttcgtcgtgcaggagcagagaacaaaccggaagagttagcaaactacgcagtagtgaaggacataaaagagctgggagaagtagacgtagctattctttgcacgccgacccgcagcgtagaaaaatatgcaaaagaatatctggcgatgggtattaacacggtagacagtttcgatatccacaccggtatcgtagacctgcgccgtaccttgaatgctaccgccaaaaaacataaagccgtatcgatcatctctgccggatgggatccgggaagcgattccatcgtacgcaccatgctggaagcaattgctccgaaaggcatcacctacaccaacttcggtcccggtatgagcatgggacacacagtagccgtaaaagcgattgacggagtgaaagctgccctttccatgaccattccgaccggcacgggaatccaccgccgcatggtatacatcgaactgaaagacggatataaattcgaagaagtagccgctgccatcaaagcagatccttacttcgtgaacgatgaaacacacgtgaaactcgttccgagtgtagacgccctgctagacatgggtcatggtgtaaatctgactcgcaaaggtgtatccggcaaaacacagaaccagttgttcgaatttaatatgcgtatcaacaaccccgcactgaccgcacaagtactggtatgcgtggcacgcgcttccatgaagcaacaaccgggatgctacacgatggtagaagttcccgttatcgaccttctccccggcgaccgcgaagaatggatcggacatttggtataatatattttatacataaaacaaaattaaaatagagaaaggcggtacacctttctctattttttttatctttgtgagcatactacaaaaaacacaattatgagaaaattattcattctctgcgcatttctattacagttcctgtcgcctgtctacccacaacaagctacaacagccaccatagagcccaatctaaagtatggaaaaccttccaaagaagaactatctctcacctcctatgcccccgacaccaccgccacggctatttatcttttccatcagggacaaagtgacttcgtctaccacgacggttttcaactgactaccgagcattgggtacgcatcaaaatcctgaaaccgcaaggagtgtcatacgccgacgtgtccgttccctactactctcccaccgatagggacgaagggaaggaaagagccagtgacatagaaggctgctcctacaatatcgaaaacgggaaatgtataaaaacgtccatgaagcgggaatctatctctttcgagcggatcaacaacctgtataaaatgctaaaattctctctgcccgctgtcaaagaaggcactgtcatcgaatatcactacaaactctactccgactatttttcacacatcgacaactggatgatgcaggaagaactcccgatgctctacaaccagtataaaatcaccatccctcatgtatttgtctacaacatcgaactccggggaaaggactacatacaagtgaagcaaagagactcctccattcatgccacagaacgtgaaggctccggtgcgggtggagtcagcaaagacttcaccgtttcggcacaagaaaccacctttatctcacgcaaccttccggctatccgtcaggacgaatcctactgctggtgtccggaagactataaggtgcaagtgagcttcgatctgcaaggcactcaattcacccccaatgaatacaaaccatacagccagaaatgggaagatgtagacaagcagttgctcaaaccggaaaatacacagttcggcgaacacctctcactcaccaaccctttccgccctgaaaccaaacaagcctacaacagcgaaatgaatttcgaggagaaaatcatctgcgccttccaggtgctcaaaaagaaaatggcctggaacggacggtatcagctctacagcaaagagctcgaaaaagtaatcaagaaaggaagcggcagtaatgccgacctgaatttcatccttatcagcatcctgaaagacttcgggctggaagcctatccggtggttatgagccgacgttcatcaggtatgctgccgtacaactttccttctctgcaaaaactaaatacattctttgttgctatccacgatataaacaaacaaaaatatgtatttttagacagttctatggacgtacctgcctttaatatattgccgcttgaattgtctgtaaacaaagcacgcatgctttccctaaaagagaaagaagaaaagaaatgggtgaacgtgatggctctttcccacaacaaaagttttatgaagattgatgctcgaatagagggaaatcaagtgaaaggacatcgcagcacggttctctacgggcaggaagccatcgaatatcaggcaaatgaaaatcataaacaggacaatctcgtttcgaatcctgaaaacaaagtcagccagaaagagaaactcactgtcaccaacctgaaagtgaaaaagcaggaaaatgactgggcactgatagaagaagagtttgacttcgtcctgcaagccgaccgaacggacgatcacctttatatcaatccaatgctctttccgcaattgaaaagcaatccttttatccagacggaacgggtacttcccatcgaatttccctacccgtacaaattcacgatgctgtctacgctgactctccccgaaggatatgaagtggaagaacttcctcaatcacaatctatccggtcggaaggagacggattacagtgtaaatatatgattcagcaacagggaaatacaatcctgctcaattatgtattccacctgaaaggctacatattcctttccgaacaatacaaacaactgcaggaactatgggccaaagtaatcgaaaaaaacaacgcactcatcgtgctcaaaaaaatataaactttacctgtttacaccaatgatccgttccagccaccccatcctgaaacaaaggatatgccgggcattcggtctgtcctgtgtccttatctgcctaagtctgcacatacagccggcatgtgcacaggatattctcaaggatgccaattccatcatcgtggaagcacgcacagaggttctctgcaaatccatgactcaatccatagaaaaagaaagcctgacaatcagcgtcctcaaccgcaaaggattggaggcagcccgtttcttctgcggatgtgacatgttccgttctttgcagaaattctccggagaaatcctcaatgccaccggacaaagtgtacgtaagataaagaaatccgaactacagaaaagtgaatacagctcttcgcttaccacggacgattatttttattattacgaatgtaatcatccttctttccctttcacagtgaaatacgaatgggaaatgaaatgcaacaacggactgatcggttatctcccttttgtcccgcaggcagaatttaaccagggagtggagaaagcgacttaccggatcgagctgcccgcaggacaaggatgcagataccgcgaactgaacacgcagggaaaagaaatcgaagtgaaggagtccaccggagccgacgggcaacaagtgatcgaagccaccgcttccaagctctctcccatcatcaaagaacctttcggtccggatttcgccgagctatttccacgtgtctactttgctccctccgctttcaagtacgacaagtcggaaggcgatatgagcagctggcaaaagtacggagaatggcaataccaactgctcaacggacgcgacctgctcaccgaacctttccgcgccaagctgcacgaactgacagccagctgcactaccgaccgggacaaggtgaaagcaatctacgattatctggccaaaaccacccgttacgtgagcatccaactaggcatcggaggtttacagcccattgccgccgccgatgtttgccgcacgggattcggcgactgtaaaggattgtccaattacacccgcgccatgctgaaagagttgggaattgcttccacttatacagtcatcagcaccaccaacgagcgcttgctaccagacttctccagtgccaaccagatgaatcacgtcatcctgcaagttccgcttccccaagatacgctctggctggaatgtacaaatccatcgcttcccttcggctatgtccaccaagacattgcgggacacgacgccttactcatcgaaccgaccggcggccagatgtatcgcctgccacctatcccgactcgctgaacacacagcacatcgttgccaacatcaccctctcccccacagccgaggcacggatagaggtgaacgaaatctcccggatttttcaatatgagaatgaagcaggcatcgtctatctggagcccaacaaacaaaaagaccgcatccgttcaagcatcaacttatcccaagccgatattcagaacctgcaaatcagcgagtgcaaggaacccaatccgtctatcaccttcgactacactgccaccagcaatcaatacgggcataaaacgggcaaccgtctgtttatccccaccaatgtgttccgaaaagaattcagtgttcctcctgtgacgaagcgcacctatcccatttacatcaactacggatacacagataccgacagcatccgcatccaactgccggaaggatatgtaatcgaaggacttccgaaaccgcttgacgtgaaaagcaagttcggcagtttccattccggtattcaggtgaaagataaggaaatctacatcactcaccgattgtttatgcgcaaaggggtttacagtccggatgaatatgcggcattcattgatttccgcaagcaagtggcaggacaatatggaggaaaaatcattttaaaaaaagaataaggagggaaacgctttacagaaaataaagtatctttgcgactcaacattttttgtgacttaaccattcaaaaaaaggaacattgaagaacaaacgatacaatcatatagaagaatgggcaaatacccttagccacggaataggcatcctgcttggaatcgtggccggatatttcctattggaaaaggcttccgagaatatggaaccgcagtgggcagttgcttgtgtatccgtctatctggcggggatgctttcctcttatgtcagttctacgtggtatcatggcagccgtccggggaaactgaaagagttgctccgcaaattcgatcatggagctatctacctgcacatcgcgggcacctacactcctttcacgctacttgtcctgcggcatgccggaggatggggatggggaatcttcgctttcgtctggctgtcggctattgccggtttcattcttagcttcaaaaagctgaaagaacacagtaatctcgaaacggcttgttacgtaggtatgggagcctgtatactggtagccatgaaacctttgttagatcatctggcagagttgggagccactactgctttctggtggctgatcggcggaggagtttcgtatattgtgggagctgtcttttattcattgcgcaaaccgtatatgcatgccactttccacttgttttgtctgggaggcagtatcggacacatcattgcgatctggctgattctgtaaggaatggtagggacaaaaaaaaggctatctatcccagacagccaatctttgttaaccttaaatctaatactatgaaaaacacagtacaaagatacggacttttcggtcatctccaaattttcaggccaaagcagcctaacttataacacggtttaataaaaagcagatgttcgttaacgtttaacgcaataaagttaaaaattaacgaatcgtttattaacgatttaaatgattgaattgccgctaatgagttttttccttctgaatttgaaacgaacaaacaaacagattcacaaattcgttatatagaaaagaggaacttaaaacgaaaacgatttagaacgcaaatttatggattggaaaaatcacctgataaaacacctgcaatggtcggactccatcatcaaccgggaggcaaaagaacacgtagcccgtgaaattgccgccacggcaaaagacggagatgtgataggagccggctccggctctacagtctacctgactctgttcgaactctcacgacgaattcgtgaagagtacttgcatatcgaagtgattcccgcctcacaagaaatctcgatgacctgcatacagctaggcatcccccaaactaccctctggaacaaacgccccaactggacattcgacggagcggacgaagtagatccgcaacagaacttgattaagggacgtggcggagcgatgttcaaagagaaactactgattagaagcagccgcaaaacgttcatcatcatcgaccccagcaagcgtgtgaatcagctgggaagcaaatttcccatccctgtagaggtctttccggactcactgacttatgtagagcatgagttgcagcggctgggtgcctcggagattgttcttcgtcccgctcgtggcaaagacggacctatctttacagaaaacggcaactttatcctcgacacccgtttcaactacatcgactcttcgctcgaagaacaactgaaggcaatcaccggtgttatagagagcggacttttcataggttatgacatcaaagtgatcgtggcggaataaaataacacaagctgaaaatcccattttgcagagacgtaaatttgatttgttctaatgcaaattaaatagtatggctttacctttattttagttagtagaactaggttatctgacacccgggtctcatacataccgacacccgggtgtcaacttgcagtcttttgcattcttctttactatcactcataatttcaatcactattagattgtaacatttaactcatacctccaaaacacgaatattaaaaacgcctagataaagaaaaacaccgggaaatttattaaaaatttgggtagaatattaatcccttctcaaaaatcaatgagaaacaaagactactaaattgataaaggaagtttcaataaaagaaaccggaagaataggttaatttttaaaatccgaaacaaaaacattgaaaaacaacaagataggagaaaaaaagcagaaggaaaggaggaaagaaaaatcaataagtcttagcagaacttggtacattcgtgattgtaaacttaccgtcaatatcagtgatagtaccaagggtagtgccattcaccaatattgaagcacctacgacaggttgcccatcttcttcagaggtaaccaaaccggtaactctggatgtttgcgctgtcactagacctatacctataaaaaggaaggtcattaagaacatcaattttcttttcataaattctctcttaaatttaacctataaacagattttttgtctctaacaggttgcaaagataacactaattatgacaaaccgaaaaaagtgttacgtatttaactaaaaagtatcgttttgaaagcaagaagtattcaaaaactgataggttaaaataacacctttccgatttagcatattttaaaagataatttctatcataaagatagcaccaaaatcaggcttttcaaggaaaagtgaacattattgcctccaaaacggtatctttttatcattttgcaccttcaaaagggttaaagaactattaacaatgataaaggcagaaacttctacataccaagttctgctaaaactttgcgcgtttcttatgtaggaatgatttcgcaggacgtttccatcaaaccgggagtgataaaaattgttttgaaaagcgacgcgaaagcactggatgaggttgtggtgacagccatgggtatctcacgcgagaaaaaagcactgggttacgccgttcaggacgtaaaatcggatcaactgacgcaagctgccaactctaatctggcgggagcgttgcaaggtaaggtgtccggtttggacgtgaagccttcaagtggtatgccgggagcttcttcacagatcactatccgtggtgcacgttctttctcgggtgacaacactccgctttacgttattgacggaatgccggtgaccagtacgccggatgttagcacagacattcagaacaatggtagtgtgagcggagcggacttcgccaaccgtgcggtagatatcgaccctaatgatattgaaagtatcaacattttgaaaggacaggctgcatctgcactttatggtatccgcgcttccaatggtgtgattatcatcacaaccaagagtggtaaaggactggaaaaaggcaaaccgcaggttagcttctcttctaatgtcagcttcgatgtagtcggtcgtctgccggagttccagaaaacatacgcacaaggttcgggtggagtattcagcactacttcgggaacgtcttggggacctaagatttccgaacttccaaacgacgcaacgtatggaggtaacacagataacgaatacacgcagaagttcggtaagcaacaaggaaaatattatgttccccagcgtgcagcagccggtcttgacccgtgggctactccacaggcatatgacaatgcaaaagacttcttcgacacaggaatcacctggagcaattcattgaatgtagcgcagatgctcgacaaaagctcctactctatctcattgggaaatacacatcaggacggtattatctcaagcactggtatggacagatataatgtaaaggttagtgctgacacgaaactgactaacaactggagttccggatttacagctaactatatcactacttctatcgacaaggcagtgacttccggtaacggtctgttgagaacggtttacgcagctcctcccagctatgatctggccggtattccaagtcacgtagacggtaacccgtacacacagaattctttccgtggtagctttgacaacgcttactgggcgatggaaaacaacaaatttacggaagataccaaccgcttcttcggaaatgtgtatgcaagctatcagactgatttcggcacaacgaaccacaagttgaacgcgaaatacatggttggtgtggatgcttacaccactcactatgtagacagctacggatatggtagcaacaccggtggcggtcgcggacagatcgagaactacggctggacaaatgctacatacaactcattgctgaccatcaactacgactggcatatcaatgaagactggggactgaacgcggtagtgggtaacgaaattatccaaagcaacagaaagaagtattatgaatatggtacgaactacaacttcccgggatggaaccacatcaacaacgccactactcaacagacagaggaagagacatggaaaaaccgtacggtgggattcttcggtaacgtatcggcttcttacagaaatatgctttatctgaccctcaccggacgtcaggactatgtatccaatatgccacgtaacaaccgctctttcttctatccttctatttcggctggttttatcctgacggaattagatgcattgaaaaacaatatagttaatcacgccaaattgagagtatcgtatgcggaagtaggacaagcaggtgatttccttgaaaactactactctactcctacgtatggaggtggattctatacgttaactccaatcatgtacccgatgaaaggtactaccgcctatactccgtactacacgattttcgacccgaaactgaaaccgcagaatacacgttcgtatgaagtgggcgctgacgtgaacttcctcgataacttaatcacattcagttatacgtactcacgccagaacgttaaagaccagatttttgaagtgcctttggcttcttctaccggtgctagcaaactgctcaccaacggtggtaagattcataccaacacgcatgaattcactcttggcttcaatccaatccggacgaagaatatcaactgggattttgcattcaactggacgaagatcgacaactacgtagatgaactggcaccgggtgtggagaatatctctctgggaggatacgttactccgcaggtacgcgcttcagcaggtgagaaattccctgtcatctacggtgtaggcttcaagagagatgcgaatggtaatcgtctggtagacgaaaacggtttacctatcgctggtgaagcacaggttatcggtaaggtttctccggacttcctgatgggtttcaacaccacattacgcttatggaagtgtacaatcagcgcagtgctcgattggaaacagggtggtcagatgtatagtaggacaaccggactggcagactactatggtgtcagcaagagaacggaaaaccgtgatggtactatcatctttgacggctacaaaactgatggaactaaaaacgatatcgccatcacaggtgcaaacgcacaacaggtatattacagccgtttgaacgacatcgacgaatcttctgtatatgacaactctttcatcaaactgcgtgaagtggctgtcaactacaaaattcttcaaaaacgttcgattgaactttctgtaaacgcatttgccagaaacattctgatctgggcacaattgcctgacctcgatccggaagccagtcagggtaacaacaacatggcaggagcatttgaagattattcaatgccgcaaacagctagtttcggctttggtttcaacattaaattttaatctgcaagacaatgaaaaaatataaatcaataggaaaattgctggcagtttctttcttgactgctaccattgcttctgcttgtacggaagacgcaatggataaaatcaatgaaaaccctaacaatccgttggatgcgcccgctaagttcttaattacggacttaggcgtaagtactgcattcagcactgtaggaggggatttctcgctctattcttctgtttacatagaacatgaaacgggtatatccaaccagctttaccgcgcggaagtacgcagcggagagcccacaacggctactacctacaacaatgcatggatcaacgtgtacgcaaatatcaagaatgctaaaatcgttatcaagaaatgcgaagaagatccttcggaaaaaggaaacgtagtgacggaagcgattgctaaaatcctgctcgcctacaatggagctgtggcagccgatgtgtttggaaacacaccgtatagccagacaggtatcctcaatccggacggtacaccgatgtatatgcaacctaaaatggatacacaggaaagtatctatcaggaagtaatgcagaacctggatgatgccatcactctactgaataacggtactgccaaagatacgggcttatccggtgcagtcggttctaaagacttgatctatggttcaaacaccagtacacaggcaagtatgtggcttaaaacggcctatgcgttaaaagcacgttatacaatgcgtctgctcaataaaagtgccaacaagactacagatcttcagaatattcttacttatgtgagcaaatcatttgccaacgcaagtgaagaatgtaagttggccgtttacgatgctgattcgcaattgaatccgctttggtccttcagctacagccgcaacagtttagcagctagtgcaagtctgattgaaaagttcgttgagcgcaatgaccccagagcaccgcaagcgttcctggaacctgatcctaccggatatatcacttatggatacggagctacgcaagctacggacatcgcaggcatcaaagcggctcctaacggaactccgcaagagttgcagaataattatggtatgtcgatgatatcatgggctatgtcggctcctactcttttaatcagctatcacgaagtgaaattccttgaagcagaagcattatgccgtttgggaggcagactgggcgaagctaagactgctttgaaagatgcagtcactgccggattcgagaatctgggaaattcaattatagatgctgcagacacttggatatatgatggtgacagcgatttgggtgcagatgtggcagaagcctatttcacggatgaagtggaaccgttattcgatgccaaccctctgcaagagacaatgatacagaagtatcttgctttcttcggcgcatccggcgaatcactggaagcctataatgactaccgccgtctgaaaggtgcaggagaaaacttcattgtactgaaaaacccgcagaacagcagtaaattcccattgcgcttcggttatggagcagacgatgtattggcaaatcctgaagtgaaagctgctttcggtgatggacagtacgtatatagcgaggccgtatggtgggctggcggaaacaaataatgaacttaaaatctctcaaaggagagactttacatagagtcgtttctgtactctaacaaattaacagagacgaacaaaaataggccaaccgtgaggttcgcctattttattttatccaaatgcattagatgaagttaggtcaataccatttttctacccaaccatactttttttccatgcttttacgtttttaacgcttaagcattttttgataaattaaaaaaaatctcgtaagaatcaatcttaccactgcaagtctggtaaatatttactcaacgtagtgcggagaatacccaaggtgataggtttcactaatacttcagttgctcctgcattcattgcattttccttatccgagctaaaagcataagccgtctgcatgataataggaatttctgtgttagattcacggattatcttcgttgcttccaatccgttcatcaccggcatcttaatatccattagcattgctttggctctttgctggtgttgctgaaacaactccaccatttcctggccatttttagcccactcgatatcacactttttgcctatgatagccttgattaatttaaagttgctgtcatcgtcttcagctaccaaaattaaaggtctgaattcattcatttgttcgctttccatatcgcttatatattgtttttttttatctgtttttttagagctatcttccttttcagcccgcaaggtataaaaaatattcatatatttcgctatctttgcgcctcaatttaaaagaatagtatgatttctgttgacggactagccgtagagtttggcggcactgctttatttagtgatatttctttcgtaattaatgaaaaagaccgcatcgctctgatgggcaaaaacggggctggaaaaagtacgctgctgaagattttggcaggcgcacggcaaccgacacgtggaaaagtttccgcacccaaagattgcgtagtagcatacctgcctcaacatctgatgacggaagacggaagaacagtgtttgacgaaacggcacaggctttttcacatcttcatgagatggaagcgcagatcgaaaagttgaacaaggagcttgaaacacggacggactacgagagcgacagttacatggcgctgatcgaggaagtgtccagcttgagcgagaagttttattcaatcgatgctactaattatgaagaggatgtggaaaaggcattgcttggattaggattcacccgaggagatttccaacgccagacgagtgatttcagcggtggatggcgaatgcgtatcgaactcgccaaattgctgttgcagaaaccggatgtgctcttgctcgatgagccgacgaatcatctggatatcgaatctattcaatggctggaggattttcttattaataatgggaaagcggtcattgtaattagtcacgaccgtaaattcgtggataatattacaacacgcaccatcgaagtaacgatgggacgtatctatgattacaaggtaaattactcgcaatatttgcagctgcgcaaggaccgccgcgaacagcaacagaaggcttatgacgagcagcagaagtttattgctgaaacgaaggagtttatcgaacggttcaaggggacttattcaaagacgttgcaggtgcagagccgtgtcaaaatgctggagaagctggaattactcgaagtggacgaggaggatacttctgcattgcgactgaaattcccgccttcaccccgttcgggcagttacccggtcatcatggagggtgttggaaagacatacggagacaaagtggtattccgcaatgctaatctgacgattgagcgtggtgataaggtagctttcgttggtaagaacggtgagggtaagtctacgctcgtgaagtgtatcatgaaggagattgagcatgacggtacattgactctcggacataatgtgcaaattggatatttcgctcaaaatcaggcttcgctgatggatgaaaacctgacggttttccaaacgattgacgatgtagccaaaggggatatccggaacaagattcgtgatttgctgggggcgtttatgtttggcggtcccgaggaatcgatgaaaaaggtcaaagtgctttcgggtggagagcgtacccgtctggctatgattaaattattgctggaacctgtcaacctcctgattttagatgagccgacgaatcatctggatatgaaaacgaaagatattctgaaacaggcattgctggattttgatggtacgctgatcgtcgtttcacacgaccgtgacttccttgacgggctggttaccaaggtgtatgagttcggcaatcaaaaggtgacggaacatctttgcggtatctatgagttcctcgaaaagaagaaaatggattcgttgcaagaactggaaaagaaataataaataataaaaagagggtatcggctacaggcgaaataaaagtatttgtatatttgcactttgaagctctgaaaagcggataacctctaaaagaaaggatgaaagggaagaaacgaattatagtaactctgctgttttttatcaacattattatgttggtggcagcggttattccccatcatcatcaccccaacggaatgatttgcatgaagcaggacttgcctgtagaacagcaatgtcccacgcatcatcatcacccgggaaacgactcatgttgcagcagcgaatgtatgactcgtttctactctcccactccatccatacatacggatagcggaccggattacgtattcatcgctaccttattcacggatgtaatcatcgagcatttattacgaccgcaagagaaacggattaaaaactattacgtttaccgagactctctgcatggtacggatactcatcgtaccacttctcttcgtgcccctccctactctgtttttgcgtaaaagcgtaaatgcaaattagttgcatctgcgctaccttatctttgtagcgtaaaaagaaaacagtaaaatttagtaggaaaatatcattatgaaaaaacttattttcgtgggaatcctgggcttattcgtgctgggatcctgtaataatagtaccgtcacacacacacacgatgaacacgatcatgccgcggaagaacataatcacgaggcagaaggacccgatcattcccatgaaggcgaatgtagcggagaacacaatcatgaagcagccgatgaatacaacgaagctgccgaagcccacggtgatgaaatcattcttccgaaagcgaaagctgaagcagccggtgtaaaggtgagcgttattgaacctgcacctttccagcaagtgattaaaaccagcggacaggtgctggctgctcaaggggatgaatcggttgccgtagctacagtagccggcgtggtatctttccgtggaaaagtaacggaaggtatgagcgtcggcagcggcactccgctagtcactatttcttcaaagaatatcgccgatggtgatccggtgcaacgtgcccgcattgcctacgaggtatccaagaaggaatacgaacgtatgaaggagcttgttaaaaacaaaatcgtatccgacaaggattttgcacaagcggagcaaagttacgaaaacgcccgtcttagttacgaagctctttctaagaatcattcggctatcggccaaagcattacggctcctattgccggatatgtgaaaagtattctcgtgaaagaaggtgactatgtgacaatcggacaaccgctggtaagcgtgacgcagaaccgtcgtcttttcctccgtgccgaagtgtcggaaaagtattacccgtatctccgcaccatcagttccgccaatttccagactccttataataatcaggtgtacgagttgaaagcattgaacggtaaacttctctctttcggaaaagctgccggagacaattctttttatgtgcctgtcacttttgagttcgacaacaaaggggaagtgattcccggctcatttgtggaggtattcctgctttcttcagtaatggaaaacgtgatttctcttccgcgcaccgcgctgacagaggaacaaggcatattcttcatatatctgcaactggacgaagagggttataaaaaacaggaaataacgataggagccgacaacggcaaaagcgttcaaatcctaactggtgtaaaggctggcgaccgtgtagtgaccgagggtgcttatcaggttcgactggcaagcgcaagcaatgcaatcccggcacacagccacgaacactaaagagactaggcgtcgcaaccgttttttttgtgcggcgcatctatcaagttatttataactctcaattaatgaaatatcatgcttaataaaattatacattactccctacacaaccggttggttgtagtttgtgcggccatcctcctgcttattgcgggaacgtataccgccatgcatacggaagtagacgtattccccgacctaaatgcacctacggtagtaatcatgaccgaagcgaacggtatggctgcggaagaagttgaacagctcgttacttttcctgttgaaactgccgtaaacggagctacgggtgtgcgccgtgtccgctcttcctctactaacggattttccgttgtttgggtagaatttgattggggaacggatatttatctcgctcgtcagattgtaagtgagaaattagcggtggtcagcgaatcgctgccggtcaatgtcggcaaaccgactcttggaccacagtcttctatcttaggcgaaatgctcatcgtcggtctgactgccgactccacttccatgctcgatcttcgcacgattgcggactggaccatccgtccacgcctgctgtctaccggaggagtggcacaagtggctgtgctcggaggagatatcaaagaatatcagattcagctagatcccgaacggatgcgtcattacggcatctcgatgggagaagtgatggctgtaacacaggatatgaacctaaatgccaatggaggtgtgctctatgaattcggaaatgaatatattgtacgtggtgtactctccacttcgaaaacagagcaacttggcaaagcggtagtaaagacagtgaataacttccctgtcacgctggaagatattgcaaacgtaaccatcggcccgaaggctccgaaactgggtactgcttcagaacgcggcaaatctgccgtcctgatgactgttaccaagcaaccggctaccagcacactggaactgacggacaaactggaagcatctctgaaagacctccagaaaaatctgccgccggacgtaaaagtttcaacggacatattccgtcaaagccgctttatcgaaagctccatcggcaatgtgaaaaaatcactctttgaaggaggtattttcgttgtcatcgtgcttttcctgttcctggcaaatgtacgtactacgctgatctcattggtgacactgcctctttccctgctcgtttcgatcctgactttacactacatggggctgacaatcaacaccatgagtcttggaggtatggcgatagctatcggttcattggtagacgacgccattgtcgatgtggaaaacgtatataaacgactgcgggagaaccgcctgaaagcggaagcagaaagactaagtacgctcgaagtggtattcaatgcgtcgaaagaggtgcgcatgcctatccttaattcaacgttgattatcgtagtcagttttgttccgttatttttcttgagcggcatggaaggcagaatgttggttccactaggtgttgcttttatcgtggccctgtttgcgtctacgatagttgccctgacactgactccggtgctctgctcttatctattaggaagcaataagacgaacaaggaactgaaagaagctcctgttgcccgctggatgaaagggatttatgaaaaagcactgacttgggtactggcacataaacgtgtgactctcggaagtacaatcggactttttgtagttgccctcggagtgtttttcacacttggacgcagtttccttccttcgttcaatgaaggatcgtttactatcaatatcagttctctgccgggtatttcgctggaagaaagcaacaaaatgggacatcgtgccgaagagttattgatgacaattcccgaaatacaaacggtagcccggaaaacgggacgtgccgaattggatgaacatgcgttaggagtcaatgtttctgaaatagaagctccgttcgaattgaaagaccgctcgcgcagtgaactggtagctgatgtacgtgaaaaattaggtacgatcaccggagcaaacatagaaatcggacaaccgatcagccaccgtatcgacgcaatgctatcgggtacgaaagcgaatatcgctatcaagttattcggtgacgatctgaataagatgttttcactcggtaatcaaatcaaaggagcgatcagtgacattcccggtgttgccgacctgaacgtggaacaacagattgaacgtccgcagctgaaaatacagcctaaacgggaaatgctggctaagttcggtattactctgccggaattttcagaatatgtgaatgtggctttggctggaaaagtgatctcacaagtgtatgaacagaggaagagttttgacctgatcgtaaaagtgaaggatgatgcccgggatgagatggagaaaatccgtaacctgatggtagacacgaacgacggccgaaaagttcctttgagctatgtagcggaagtggtatcggccatgggtccgaatacgatcaaccgcgagaatgtgaaacgtaaaattgtcatttccgccaatgtggccgatcgtgatttgcgcagtgtcgtgaatgatattcagaaacgcatcgacacatcggtacaattacccgaaggttatcatatcgagtatggtggacagtttgaaagcgagcaggctgccagccggacgttggcgttgacttcatttatcagtatagtggttatcttcctgttgttgtataatgagttccgcagcgtgaaagaatccggggttatcttgctgaatcttccgctagcattgatcggtggtgtctttgccttggtgattacaacaggggaagtcagcattccggctatcatcggtttcatttccttattcggtattgcgacccgtaacggtatgttgctcatcagtcactacaatcatttgcaaaaggaagaaggtttgaatgtatatgatagtgtgattcaaggttctctcgaccgtctgaatccgattttaatgacggcattgtcttctgcactggcactgattccattggcacttgccggtgatttgcccggtaacgaaatccagagtccgatggcaaaagtgattctaggaggattattaacgtctacttttttgaacggttttatcgttccgattgtttatctgatgatgcatcggaaaaaggcccagaaaagcctgtagagagggatatttttcctcggtgagaaagccattgttccccggtgaggaaacaagtgtttctcggtgaggaacgggtcgttcctcggtgtcaaacaaatagatgccttatcataaagtatctatcaacaatagcttgtaataaataaagaaattagaaatgaaacaaatcatgaccataagcgctgcacttcttttcttaaccataggtgaagtgcaagcccaaaacggaattgaacaggtattgaagaatatcgaaacgaacaataaggaattgcaggcaaacgagcaactgattacctcgcagaagttggaagccaaaacggataataacttgcctgatcctactctctcttacgcgcatctatggggagcaaaagataaaagcgaaacaatcggtgagctggttgtttcacaaagctttgatttccctagtttatacgccacacgtaacaagttaaaccatctgaaagccggaactcttgacagtcagtcggatgtttttcgtcaggagaaactgttacaggcaaaagaactttgcctggacattatcatgcttcgtcagcaaaagcatattttggaggaacgtctccgcaatgcggaagaacttgctaaaatgtacgccaaacgtctccaaacaggggatgcaaatgctctcgaaaccaataaaatcaacttggaactgttgaatgtcaaaacggaagcatctctgaacgaaacggcacttcgcaataagcagcaggaactgaatacgctgaatggtaatattccggtggttttcgaagaaaatcaatatccggctataccgttcccaagcgattaccaaatgttgaaatcagaagtcatggctacagaccgtaccttaatggcactaggcaacgagagcctcgttgcccgtaaacagattgctgtcaataaatcccagtggctgccgaagctggaactcggctaccgtcggaatacagagactggtgtgcctttcaacggtgtagtggtgggcttttccttcccgcttttcgaaaatcggaataaggtgaaaattgctaaagcgcaggcactcaacatcgacttgcaaaaggataatgctacactgcaagtggaatctgaattggcacaactttaccgggaagcgaaaacgctgcatgcttcaatggaagaatatagcaagactttccagtctcaacaagatttggcattgctgaaacaagctttgacaggtggacaaattagtatgatcgagtacttcgttgaagtatcggtgatctatcaaagtcatcaaaattatctgcaattggaaaatcagtaccaaaaggcaatggcacggatttacaaaagcaagctataaatagtacataaaaccctttaggtatgggttacgctgaacatactaatttctatttttaagttatataagtatgtttatataataaattaggcacggattacacagaattcacggtctttagtattgtcataactataaagcaacagtgttaatccgtgtaattcgtgcctaaatatatctcctctctttttcttcaaattccgactggatatttcaaaacaatacattacatttgcaacgaacataaaatctgaattatgagacctaaacatttctatttattcatgttatgctgcatccttacgctactaagtggctgtaaagatgatgacgacaatccactgcgtttttacaacagtgaatacgaagtacctatgggtggcagacgttacctcggcctggaaagcggaaatggtgactactcacttgcagtgaaagacacacgcatcgcaagtgccggaactgaaactggctggagtggagtacctgccggacgtatgatttatgtaaccggtatcctcaccggaacgacttatctgacagtaacagacaacgccacacaagaaacctgcactttaccaatcaaggtggtcgataattacgaaaatatggagttgctacgcagctacttgtctaacttacccaacggagatgcgaatcttctacccggtatttccgacatttttctgattaacaaccacgcacgggatgcttattttttcaaacaaggagaacagaccgccttttcatccggacttgaattaataacccaaggaagttacaaactggaaaaagaagaaggagacgataagaaaatgacactaaccctcactttttcggaagatatggcaacacctgtttccgatcataaattcataatatggggaaactcgtacttatttcatcggttggataaaagcctaaatctgaactggaacactccgcctattggagaaacgcggacatcacctgcacctcctccttcctacacgctggaagaaatagctgaaggcacagaaatcggaaaaggcagacagcttagctttagtctttcccaacaggaaatacctgcgggaatactgccttaatcagtaacgtattctgataagatgcgtatattttccggtaagtatccactacggatgcgccattcttgcggataaagattattggcacgattgccgatgttcttcacaaatccgagaggaatatgccgataagtaagcaaaacatatccacgaggggctgttaccggtaaggtaatggcctcttttcgtaaatatgtgatggcctgttcataacttatttcttccgtagcgaatgcttcccggcataaaagtgaggtacacattgccaacgcatggttagggatcaaatcctttcctttcacctcgcctatctcaatccctgccgacacaattttcaggctttgtttcatcgtcgccaattcattagtatagtactgtgagaaagctcggatatttgttccttccgccaataaaatatacttgtccgaattttcatcattcaaccaacttttagccatattcagatattctttcgatacaggagaagatgctgctgttcctttcttatccttcttcttgaaagctttctctttggcggaagaagatactgggatctcttcttccgtctccggcttacgaaaagccaccagaaaaaagccttcacctttcgtcttatgagggaaaaaatgatagacgggaatagaagatttagaatgatcccctttatctgacaaaagatctcctgttatattccaattctcctgcacctgcacagttaatggttcgcccccatactcttgttgaatccaacgtgcattctcttcatcctcttttgtattaaatgtacacgtactatatataagaatacctccgggcttcaacgcatcccagatatctgcaataatccgtcgctggcgctgccaacagatttccacattctcggggctccactcttccacagctaccgggtctttacggaacataccttcaccggaacagggaacatctgtaagaatcacatcaaagaaagagagtaaagccgaaaaatctgccggatcattattggtcactaccacatccggatgtccccacttcgtcaggttttcagcaagaatctgcgaacgattccggattacctcattggctaccaacaggcttccttcgggaagtacactacgggcatgagtcgattttccaccgggagccgcacaaagatccaacatcttcaccggtcccgtgatatattgccggagtacctgctccacaaacatggaagaagcttcctgaacataataacagcctgcatggaataagggatcgaacgtgaaagtgagacgctcctccaaatagaatccttcggaagaccaaggtactttatccgataaagaatgattgattttcaattgattcaaccggatgctaaccggtggttcctgttggagggcaacagccagtttgtcgtattcttcatcgcccaatagagcgcgggtgtagtctataaaagaagcaggtaattccatctttcgtttattaatttccgcaaatatcaaaaatatttcgtctctttgcaactttctatgatattaactacgtctaacagataaagaaataaattaaaaaactattgatatgaaaaattttctattagcattgatggttgtactgaccacttgcacactggctgttgcccagaccaccgttgttcgtgattccatcgggaaagtaaaagtaactgtgaccaaagacaataaagcaaatacgaacaatactgctgtcacagtgattggtgtagacacagcagatgctgattctgcagacgtaaatgcaaactcaagtaatgttaacaccactcatggcaaagccagcttcacattcgattcggatgacagcgatttccccttccacaatgttagtgccggcggaggtattctggtagcaatcattgcaatcattgctgtattcggatttccggtattcattctatttgtaatcttcttcttccgttataaaaaccggaaagcacgttatcgccttgccgaacaggcacttgctgccggccaaccgcttccggcagagtttatccgcgaaaacaaaacagtcgattcgcgttcacaaggcatcaagaacacctttacgggtatcggtcttttcatcttcctctgggcaatcaccggcgaattcggaattggagctatcggcttactcgttacattcatgggtatcggacaatggattatcggtagcaaacaacagactcaagacacaaatgctacccggatgcatacgggtaataaggatgaaaaaaagaacccgaataacgttagaaccgatagtttcgaaatcatcccttccgaatccgaagagaaagacaaaggagtaaacgaagaaaagaacgacgagaataaatgagccaactcaatgatatatcgttagtcgcacaggtcgtggtgttcaagaacaccagggcctttgaccagttggtgaaggagtatcagtcgcccatccggcgattcttcctgaacctgacttgcggcgacagcgaattgagtgacgaccttgcgcaagatacatttatcaaagcatatacgaacattgcctctttccggaacttgtcaagtttctctacgtggctgtatcgtattgcttataatgttttttatgattatattcgcagccggaaagagacagccgacttggatacaagagaaatagacgccatcaacagcaccgaacaggagaatatcgggcaaaaaatggatgtctaccagtcactcaaaatgcttaaagaagtggaaagaacctgcatcacgttgttctacatggaggacattagcatcgacaaaattgcagggattgtaggagtaccgtcagggacagtgaaaagccatctgtcacgcgggaaagaaaaattagcaacgtatttaaaacaaaacggttatgacagaaatagacaatgataagctcttgcgcgatttcttcgcagaaaacaagcaggaaatagcagataacggattcagtcgccgtgtcatgcaccacctacccgatcgtagtaatcgcctggctcgtatctggagcgctttcgtgatgactgtggcggccgcactttttgtatggttaggtggattggaagcaacttggggaaccataagagaagtatttatcggtatgattaatcatggcacttcaagccttgatccgaagtcaattattatcgcagctgttgtactattattcatggctacacgaaaggttgcttcgatggcataattaactcctggaaagaagttatttcgttaaagaatgataaatttgcccttgttagcaaaggagcccaaacttagatatcgtatctttgttcttctgtaaactaaaagagtgagaagagttttgaaattacgtatatttattttatttctgttcctgcctatattgagtgttcaggcaggtatcatcgacagtctgatgatacatcccagggactcaatcggattaaccagcgattcccttgtgctacgttatttacaagaatcgggaatccctatatctgataataataaggtaaaactgctaaaaagcggacgggagaagtttatcgatttgtttgaagccatccgggaagctaaacaccacgtccatctggaatatttcaacttccgaaatgactccatcgccaatgctttatttgctctgctggccgaaaaagtgaaagaaggggtcgaagtacgagctatgttcgatgcattcggaaactggtcgaacaataaaccgcttaaaaagagacatctcaaaaaaatacgtgaacaaggaatcgagattgtcaagttcgatccattcacttttccttatatcaatcacgccgcccatcgcgatcaccggaaaatagctgtcatcgatggaaaagtggcttataccggtggtatgaatatcgccgattactacattaacggactacccaaaatcggaacctggcgtgatatgcacacacgcattgaaggggatgccgtcaatgatctgcaggagatattcctaacgatctggaataaggaaaccaagcagaatgtaggtggagccgcttatttcccccaacatgaggaacaaacggacagtacgaatattgtggtagcaatcgtagaccgtaccccgaaaaagaatagccgtatgttaagccacgcttatgccatgagcatctattcggcccaaaagaatgttcatatcgtcaatccttattttgtaccgacttcttctatcaaaaaggcgttgaatcggacaatcgaccgaggcgtaaatgttacaatcatggtttcttctgcctccgatatcccgtttactccggatgccgcactttataagttgcacaaactgatgaaaagaggagctactgtctatatgtataacggtggatttcatcactctaaaataatgatggtggatgatttgttctgtacagttggcactgccaacctgaacagccgcagcttgcgctatgattacgaaacaaatgcctttatctttgataccaaaataacgggtgaattaaatacaatgttccggaacgatatcgagcattgcactcaactaacgcctgaattctggaaaaagcgctccccgtggaagaagttcgtcggctggtttgctaatttattcactccatttttgtaattttgtgcggagaatcattttcaccacaacttattcattatgaaacaatacctggatttactcaatcgtgtactaaccgaaggtacagaaaaaagtgaccgtaccggaaccggaaccatcagcgttttcggtcatcaaatgcgttttaatcttgatgacggtttcccgtgcctgacaaccaagaaactacatctgaaatcaatcatatacgaattactttggtttctgcaaggtgatactaatgtgaaatatcttcaggaacatggagtgcgcatctggaacgaatgggcggatgaaaacggcgacttaggacatgtttatggttatcaatggcgttcatggcctgactataacggtggatttatcgaccagatcagtgaagtggtggaaacaatcaaacataatccggattcacgccgtatcattgtaagcgcctggaacgtagcagatttgaataatatgaatttgcctccctgccatgctttctttcagttttatgtagcagacggacggttgagcctgcaactgtatcaacgcagtgcagatatttttctgggtgttccttttaatattgcatcatacgcattattgctgcaaatgatggcacaagtgacgggactgaaagccggagattttgttcataccttcggtgatgcgcatatctacctgaaccacttggaacaagtgaagctccaattatcacgtgaacctcgtccattgccacaaatgaagatcaatccggatgtgaaaagtatcttcgacttcaaatttgaggactttgaattagtgaactatgacccgcatccgcatattgcgggagcagtagccgtgtaactttatgacctcaaatccgcaactacgcgcctaatatgatacagaagcgaaaagaatctgcatcgttagtaaaaagggggcacagtgcatcgaatgtcaccataaagacatataaatgccccttaccccaccatgcgacttgaggcaatacgcaaaatcacgactataagttgtcggtgttatccaaagtcattctggaacacattggcataagcattgttgcatgaatagatattcagcacatacttccttgatgtcctgacccatttggctggcacagagatgaacttaaagacaaacgtcttgatgcggcttgttgctttgagtccgaacctcttcacgtcaagcctcgccatgatgaatttatagaagttgcgtatgagtgccataagcagaagaaacaccgtgttttctcccataaaggattttggaagcctgttccagccgaatccgttattcatatcatcgaagatgcgttccttccctccacggaggttatagaattcgacaatctctttctcggaagactcgtagtcatttgtaaggatgcagcggtaggtgtattctccttcccacaggtcgagttcgccgtctatccgcttctgtctttgaatcacaagacggtatgccttccctttccatttctcgatgagaatggaggccagctcaaactcaatgccgcccaattccactttcttccaacctctgagggcaaagatgtcattgtagagcgaactgcatcggttagcacggatatagaaggtcttgcagtgtttagcaatctcttccactatctcttcagaacacgagccgcaatcagctctgaaacggttgataataagcttgttttgttcaaacctttcaaagaacctcttcagcgtgtccttctggtggaaacggacatttgtgttgccgtcgctgttctcaatgccgacaatcaagttgccaataaccgccacgccagggcgataaccaaggaacttcttgtatgtaggcttcgcatcaaacttctcagcctctatgaactggtggtcgaagtcaacgtcatacccctcgccctctttcagctgccctgtggacaataggcaattgaggagcagtgtattcagcttgtctgccgtgttgaagtcgtaggtcttgccagtgtcggatgtgtaggaaatgttatcctgggtcagttcctttatggctctaagaatcgtgtcggcactgcatgtgcgaagtgtcggatgaagcgaaaggtggtacatcagatgagtggtgacatcctcgatgcatgagccgccacaaaaataaacgctcataagcgaacggatgatttcgctgtattgataaccatacagcctgcatctcataccgagggttgagtcgattacagatgagagtctggagtcaaattgctccattattgaaaatattcctccaaaaggagtgagtttctcggatttaattgctacctttgccatgtctgtcgggtttgatacatattttgatttgcaacactaagataggtgaaaaatctgacatggcaaattcctgagcaactttttgttgctcaggtacttaaaaagttatatttgtaatagtgttgcggaattaaggtatgagtaaaatatctatcattgctgccgtagaccgccgtatggctatcggcttcgagaacaaacttcttttctggttacccaatgatttgaaacgtttcaaagcattaactaccggaaacaccatactgatgggacgcaaaactttcgagtcactaccgaaaggcgcattacccaatcgcagaaacatcgttttatcttccaacccggctacagaatgtcccggtgcggaagttttcccttcactcgaagcagctttgcaaagttgtaaagaggaggaacacatttatattataggaggagcaagtatttatcagcaggctctttctttcgctgacgaactttgcctgacagaaatagatgatatgactcccgaagccgacgcctattttccagaagtatcgccagagatgtggcaagaaaaaagcagagaagctcatcctgcggatgagaaacatctctgctcctatgcttttgttgattacgtgagaaaataacgattaatcttcatcttctatgtcgaccatgattggcatctgccgcttaatggcttcatggaaggagattaatgtctcggtacgcgccaaacccaatggttgtaacttatcgtgaataatactcaataagtgatggttattctttgcgtaaattttgataaacatatcgtattttccggtagtgaaatgacattccaccacttcggggatagcttctaaagcttttgttaccgaatcaaaggattcgggatctttcagatatataccaatataagcgcaagtctcatatccgattttctcggggtcgatgacatattccgaaccttttaatatacctaaattagtaagcttctgaatacgctgatggattgcagcgccggaaacattacatgctcgtgctacttccaaaaaaggaatacgcgcattccctgcaatcagtttcagaatttgctcatctaaagcatctaattgatgatgtcccatttttgaatcaaattgtttttatcaatgaatcttttatgcaaagttagcgatttttcgacaacaaatactataatctattacttttatttgcagaaagcggataagtcaacaagagttcgtacctttgcgaaaaacataaatataccattaatatgaaacatatttgctgtattattctgtgtttctgtacttctataggaagttatgcacagaattttgctgattattttcagaacaaaacattgcgagtggattatatctttaccggggatgctacacaacaggctatttatctggatgagctatcacaacttcctacctgggcaggacgtcaacatcatctttcggaacttccattggaaggcaacggacaaattatagtgaaagaccttgccagcaaacagtgtatctacaaaacgtcattctcttctttgtttcaagagtggctgtccacagacgaagctaaagaaacagccaaaggatttgagaatactttccttcttccttatcctaaacagcctgtggaggtagaagtcactttatattctccgcgaaaaaaaagattggctacctataaacatatcgtgcgtccggatgatatattgattcataaacggggggtatcacatgtcactccgcatcggtatatgcttcaaagtggtaacgaaaaagactgcatagatgttgccatccttgcagaaggatacacagaaaaagaaatggatattttctaccaggatgcccaacgtacctgcgaaagtttgttttcgtatgagccgttccgctccatgaagggtaaatttaatattgttgccgtagccagtccttctacggacagtggtgtcagtgttccccgcaaaaatcagtggaaacaaacggcggttcactcccatttcgatactttttactcggaccgttatctgactaccagccgggtaaagtctatccataatgcattggcaggcatcccctacgaacatatcattatcctggctaacacggatgtatatggtggtggaggaatatacaattcgtatacgctgaccacggcccatcacccgatgttcaagccggtagtcgtgcacgagttcggacacagtttcggtggactggccgacgaatatttctatgatgatgatgtgatgacagatacttatccgctggatgtcgaaccgtgggaacaaaatatttcaacacgggtgaacttcgcttccaaatggaaagatatgcttccgtcaggtaccccgatcccgacccctattgctgaaaaaaagaaatatcccgtaggagtatatgaaggaggtggctactctgccaaaggcatttatcgtccggcttatgactgtcgcatgaaaacaaacgaatatccggagttttgtccggtttgtcaacgtgccatccgtcgaatgattgaattttatgttccttaatggaatacaattatattattgtcaaacttaaaacccaaacctcatgattagacttcaaccaattagtacgtcggatctgcaacattacaaattcatggaagagcttctaattgattcgtttccaccggaagagtaccgtcagttggaacaactgcgcgagtacactgatcgtacgggcaactttcataataacatcatctttgatgatgacctgccagtcggcttcattacctattgggattttgacagtttctactatgtagaacactttgcaaccaatcctgccctgcgaaatggaggctatggaaaacgcacgctggaatacttatgcaattatttgaaacgcccgatcgtattggaagtagaacgtccgatagaggaaatggcaaaacgacgtatcagcttttatcaacgtcaaggctttacgctgtgggaaaaagactatagccaacctccttacaagcccggagatgattttctgcccatgtatttaatggtacacggagaattggattgtgaaaaggattttgaaacaatcaaaaagagaatacataaagaagtatatggagtaaaagacaactaattaaattaggtagcagctcgaaattagtttcacaaatggaaaaccttactccagctacgtatatataaaaagggcgttcaatttgaattgaacgccctttttatatatattgaattaactaattacttctcaccacgtttcgtagccgaatagttaatcttcaaagcataagattttctaagagcattttttacatcagtaacaatacccatctttgtcttctgatctactttcagagacacagtcatcttagcagcatcgccttcattcatactcgcacgttcctgaaaaatgaagtcttgtacttcacccacttcagcataactgtcattcaactgaatacgactttcagtacccattttcgcgcgatattcttgtgtaggttcccctacataaatgaatgttaccagtgatttcttctccagtttttcgagttcagtaccttgcggaagtgtaaactgcacctttaatgttacctcacgcatcgttgttacaatcataaagaagaacaacaaggtaaagataaggtcaggcaacgaagaagtattcaatgccggcatttcacgtttaccagtcttattaaattttcccattacttacttctttttttctccgtattttttaggttctgcttcagaaattcgttgcggataaacttcacgaacagctttctgctgtgcatcattcagttcagcgtaagtaaccccaaacttttcttgagctaactcatctctcaattcattgtatgcagctaccaattcgttctgcacacttatatatgcctgataagaagacccgcggtcattctgcaaagaaattacatgcttatcattaacaagagtagtaccaaagaaatcgacatttttttgtgtcttttccggcatattctcagcgttattgatgttagcaataaactctttggctttctgcctcaactgatcaacaccaatataatcattcccgcacatcaaagcatcatctttattcagataaacctgcaggatgttacgttctttaattttatcggtattctcattcttttcatcttcgggtggtggaggcaaaagtcttgccaaaccacggtccgtatccattgatgttgtaatcaagaagaagatcagcaacaagaaagcaatatccgccgtagaacttgagtttatatcaggaacttttctttttccttttgccattttaataacttatttaatcgagtatcctcaattgattacgacaattttttctttataccactcgcaatgattgcaacaactgtcacaaacaacaatatgtaaatagaataaaggaacatatcagttactttcagccaaaaaggaacattgtctgtaccactatagccaggaatctgcattggtgtaccatcacccattgcccaagctacaataagaacaacagctaaaagaaccaaaccaagtaaagacttgatggcatttgccgggttatccttcaaagctgcaccaaattggaatacagcagcaataacagtggctgcaatggctaagccaaacaaaacgtacatcagatagagtaaggcgtctgtttgagccggttgccacatttcgggatctactcccggaattaaggcatcgcccgaggcatctcctcctaagaagaacaagccaataacgatcagaataatagcaaacatcgcatacagtgcgtaatacgatattctatatgttaacttactcattttagattattttttgtatttcaagttatatttgattaccatatcaagcaaagagatagaagaatcttccatttcacttgtaagagcctcaattttagaaagtacgtagttgtagaatacctgaaggatcaatgctacaatcaaaccgaagatagttgtaatcaaggctactttcataccacctgcaacaaccgtcggagagatatcacctacctgctggattttatcaaatgcctgcaccataccgattacagtacccaagaatccgagtgacggagccattgcgataaacagtgtgatccaagaacatcctttttcaaggtaacctgcctgtacaccaccataagatacaactgacttctcaactacgtcaataccttgatcgattctcatcaaaccttggtagtagatagaagcaaccgggcctctggtgttacgagcaatgtctttagcagcttcaacatcacctttttccaaagcagcttcgatagatgccatgaatttttttgtgttgatttcagccaaactcaaataaatgatacgttcaatacagaaagccaaaccgatcaccaaagcgatagctaccaaactcatgaaagatgcagtaccttcgatgaatttaactttgatttccttgtgaataccaccctcttctgcagcaggagcagtagctgtagtagcttcagcggcaggaacagcttgttgttcagtttgttctgctgcaggagcgtcttgagcctgagcaagttgaattgagccaaaagtgaaggccccaatcacagcaacaattgcaaataactttttcattgtgtgtctaatttttaagattaattaattgattattattattgtatttacttctcatctctctttcatttctgcggagagacggggattcgaaccccggatacgcttttggcgtatacacgctttccaggcgtgcctcttcaaccactcgagcatctctccctctgtgttttcagcattttcagctacaaatgtattcttttttttcttttcaagaagcattctcccccttttatcttgaataaatactgcaaattaatataatttaaaacctttcgaaccttatttgcggattccgaacacttttaacgcattcacagaagtgacctgtgccacatactccggatccctctgataaatatcagccaccttcatgagtgtgtctctcacattggcactttcatttctctttccccggttcggcacgggagccaaatagggagaatcggtttcgagcacaatgcgctctaaaggaacagtcgtcaatgcctccggcaaagtcgatttcttgaaagttacaactccattgatacctaacataaatccttcaaattccaacaatttcgccgcttcttccgatgtcccagtaaaactatgaaaaatgccggttaatggggtatttttatagggttccattaccttatatatatattcaaacgcttctcttgaatggattacaatgggaagaccatattccagcgcccattctatttgcttttcaaaaaccaagatttgctctttcagaaaagtcttgtcccaataaagatcaagacctatttctccgatagccacaaactcacgggaagtcgacaagtatttgtgaacaatcgctaattcctgttcatacgattcattgacagaagtagggtgcagtccgatcatcggatagcaaaatcccggataatccctacaaaccgacaacatagcatcaatggtcgtactgtctatattgggcataaaaatataggaaactcccgctttctgcgcacgttccatcaccaaaggcaggtcttcggtaaattcttcaacaaaaagatgagaatgagtatcgatcaacatgatatttctttttcttcttttattttttcgctggagcgataataatatatcagtccatagtcgcggcatttttctaatcgggtatcattgggagtgacatcctggtatttggcttctacctgattccagatatccaaaatcaattcatcggcacggtcacgcatagacgccagttcatcaagactacgattggttaatgcctgatagttcttctgccgttcatagctttccagaaaaatatcataatgcacttttacgcgtgcaatagtcggattataaataggtatgccaccttgagtggtccttaattgttcgccttcgattattttcttcccccactctaccagagaggcttcactcaacaggtccggtacggtattggaagcaggcaagccatataactctttatgtgccaccttgatttcatcacgaagcactgccaaattgagcacctgaataaaatgagagatatacagccgggcagtcttcacattcatctggtgtttacggctggcacgcgactgattatcgtagcactgggtataataaatttgcgctgcctcaaaccgatgcaaaaagttacgcgcttcaaataatgtcttcaatgtaatagccaagtcacgcacattatacatctctcccttttcgacagccgctttcagcgcccgaactcttgcttgatctgtatttggtagtcgtctataaggcatatctccgatacttaactacatttcacgatacattaataatttcaccagattcttcagttctttttttctgtcttccgcaacagctaccgccgccagactttccatagcgaatgtataatattcacgcattttgctttcacaaatattgcggatattcaactgattatagatttcagttaccgcttcgattttttcagaaggttgaaaagcctccgcattcaaccaacgattcaattcagcatgctgcttttcatccgcacggttcagtgctttgataagcatatatgtttttttattgcagaggatgtctccacctatcttcttcccgaacacttccggatcaccatatacatccaacaaatcatcctgtaactggaatgctactccaatatgcattccaaaattatatagattttctgcatcttcagcagtcgctcctgccagaattgcacctattttaagactacccgcaagcaacacggctgttttcaaacgaatcatttcaatgtattcgtcttctgtaacgtcacagcgagattcaaattccatatccagttgctgtccttcacagatttcgagtgtagtcaaactgaataaatccatcacttctttcaggtgttccggtggacaacccgtcatataccgaaatgccagaatcaacatagcatctcccgaaagtacagcagtattatcattccagaccttgtgcacggtaggtttccctctgcgcacatccgaacgatccatcaaatcatcatgcaacaaggtgtgattgtggtaaacttcaatcgcagtggcaggatcgtatatagacgcaacatcctcccgatacaagttatatcccatcaacattaatacaggacgtatccgcttcccacccagagaaaggatatattcaatcggttcataaagtcctttcggcgtccgggtaaactggatttcagaaatatgattatttatcttatcgagtaattgagaagctgtaaacatgatgaataaaaaaattaatgaataaaaagaggctgccgaaagcagcctctccatttatagtgttacaaattactgcaatctaaacatcacaggaactgtaaatttaacacgtaccggttttccgcgctgcatacctggtttccacttcggcatggtattaatcacacggagggcttctttatccagatacgggtcgacgctacgtacaaccttcgcatctacgatactaccgtctctgttaacaacgaactgtacgataacacgtccttgagttccgttttcctgtgcgatagtcggatatttaatattttttgccagatactgcatcaaagctgcttgtccgcccgggaagtccggcatattttctacaacctcgaaaatagtctgttcttccggttcttcttcaaccacttgtacaggcacatattttacttctacacgagcttgattatcttcattgataatagttgttgtttcctcaatatcagctttatcatccacaatctccagcaattctgctacctttggagcttcaggtggtggtggagctgcttgttcaggggtttcggtaataggaataatttcctcttcaaacacgacatcggctactgcctggcttgtatctatcttcacgtcacgctgggtccattcgaacgccacgaacatgaaagctagaactaccacgtaaccaacgagcaaccatgtagacttcttgccttccaggtctgccttgggtgattttttaacttccataaatttattaatataatgattaaaaaaagtgtcctttcatgtgtctccgggcaaatatagtacattttcatgtattcgttcccctctttgcctctttttatccggctttttaacttttttaattctttcgtacttgtcttgctccttttaacggcaaacttatggttgattttcaaatttaccgtatctttggcgaacaaatcagatgaactgaatatgaaaaagataacaattgcaatcgatggcttttcctcttgtggaaaaagtacaatggccaaagatcttgcccgcgaagtgggttacatttacattgacagtggagccatgtatcgtgcggtcactttatatagtatagagaacgggattttcaacggagacgtgatcgatacggagaaactgaaaaaagaaatcaagaacattcgtatatctttccagctgaataaggaaaccggacgtcccgacacgtatctgaacggcgtgaatgtggagaataaaatccgttcaatggaggtttcttccaaagtgagccctatcagtacgcttgacttcgtacgtgaagaaatggtggcgcagcaacaagcaatgggaaaagaaaagggcatcgtcatggatggccgggatataggaactaccgttttcccggatgcggaactgaaaatatttgtaaccgctactcccgaaatccgtgctcaacgtcgttatgacgagctgaaagcaaaaggacaggaagccagcttcgacgaaattctggaaaacgtgaaacaacgggattatatcgatcaaaaccgtgaagtaagcccgctgcgcaaagcagaagatgcgctgctcctggataataccgacttatcgattgaagagcagaaaaaatggcttttcgaacaatttaataaggtaagtaaatagtttgttttatgatcaaggtagagatagacgaaggttccggcttctgctttggtgtggtgacagccattcataaggcagaagaagagttggcaaagggagaaacactctattgcctcggagacattgtgcacaatagccgggaagtggacaggctgaaaacgatgggattaatcaccatcaatcgggaagaattcaagcaattgaaaaatgcaaaagtattgctccgggcgcatggagagccaccggaaacttatatgattgcccgtgaaaataagatcgagattatcgatgcgacctgtccggttgtattacgtttgcagaaacgcatccgacaaggctatctggcagacagcgacgaagaaaagcaaattgtcatctacggcaagagcggacacgctgaagtgctgggactggtagggcagacagacggaaaagcaattgtgattgaaaaggcagaggaagccaaaaagctggatttaaataaaagtatccgccttttctcacagacaaccaagtcactggacgaatttcaggaaatcgtagaatacttcaaacaacatatttcaccggaggctactttcgaatattatgatacgatctgccgccaggttgccaaccgtatgcctaagctccgggagtttgcggctacacacgatttgatcttcttcgtcagcggcaaaaagagttcgaacggaaagatgctgtttgaagaatgtttgaaagtgaacgctaattcgcatttgatagataacgagaaagaaatcgatccttctcttcttcaaaacgtaaaatcgattggtgtatgtggggcgacttctactccgaaatggttgatggagaagatttacaatcacattcggacgcttatcaaagaataattgctttattcataaaagaataatagcaaagcaacataagaaaaaacggcaaagtaacacgaatgaataaaaagaaagcaagaaagggctatttgaacatttttaatgttttcttcatacgaaaaaaaacttcataaccgctgctttcaactttttattgtacatttgccgcgtcaaactaattaatgagagattgttatatgggaacagttaagtgtatcggaattttgacctccggaggtgatgctccgggaatgaacgctgctatacgtgcagtgacacgtgcagccatctacaatggattgcaagttaaaggtatatacagaggatataaaggtctggttacaggtgaaatcaaagaattcaagagtcagaatgtgagtaacatcatccagttgggtggtactatcctgaaaacggcacgttgtaaagagttcacgactccggaaggtcgtcagttggcttatgacaacatgaaaaaagaaggcatcgatgctttggttatcattggtggagacggctcactgacaggtgcgcgtatctttgcacaggaatttgatgttccatgtatcggactgccgggaactattgacaacgacctttatggtacagatacgaccatcggatatgatactgcattgaataccatattggatgccgtagataagattcgcgacacagccacttcacatgaacgtttgttcttcgttgaagttatgggacgtgatgccggtttccttgcgttgaacggagctatcgcttcgggtgcggaagctgccattattccggaattcagtacggaagtcgaccaactggaagagtttatcaaaaacggattccgcaaatcaaaaaacagtagcattgtattggtagccgaaagcgaactgacaggaggagccatgcattatgccgaacgtgtgaaaaacgaatatccgcaatatgatgtacgtgtgacgattttaggtcacctgcaacgtggtggtagcccaactgcccacgaccgtatcctggcaagccgcctcggtgctgctgctatcgatgctattatggaagatcaacgtaacgtaatgatcggaatcgaacatgatgaaatcgtttacgtaccgttcagcaaggctattaagaatgacaaaccaatcaagagagatcttgtcactgtattgaaagagctttcaatctaatctttttatttttaggagttcagcttatatcagtatataagataaagagcggtggatgaacgggagatttccttatcattcaccgctcttctttcatttattcaatgcttcttttcaccacagaggacacggaggacacagaggtgaatttgttttatgacttacggttgcgaccctaattttgatgcgtaatcctcctactataaagttgaaaaaacatgaaaacatctgccacctgcaaccaaacgcgtgtaatacactagttaatagatagttgtaacgttgcggatactgttgcagataggttgcagatcaaagtatctgccacacagtataagccttgcaaagccaattctccatgggtgcaaaagtttattgtatacattaacttcccgtttccaggcggggaactgtcgtttccggcattagaaattacagtttccacggcaggaaacgagagtttctaaggcgggacactacagtttctacgtaaggatactgtcgtttccccgtagagacaccacaatttctccatagggtcccccaattatcccatagctttgcacaaagggatcaaggctttttctttgattatataacgtgttgcagatactttatctgcaacctatctgccacaggtatctgcaacgttacaactatctattaactagtgtattacacgcttttcgttgcaggtggcagatgtttttatgtttttcaactttatagtaggaaaaaatttcattcatttccgtacctttatgagtctttttatccataaataatatccagtcagtggtagtgcagaccccaataaggcagcaataaaggtaagtatgcgagtaaacattcctccccagttaccaacatgcacagaataaatccaaccacgaatctttcccgacttgtcttgatgttgataaagacttgtttctgtaaattcaccattatccgtattgaaagaataacggtcagatgcccgctgattaccgaaacggttgaaagacacgcttgccgtaccagaagaaatactgatttgcttatactccggattctgacgtcttagtttatcataaatctcttgccaataaacgaatggtgaagttaccgagtacatatcactatgattgttttccggacgtctgcttctttcaccctttcgaacctcatttccttctcttttcttttcccgatgggctgccagtttggtatttctcttttgagcatcacttttctgttcatgtccttgggcggcacgttgctgtacttctaccccgaagaccttatagaaagccgtccgataccacggaaaagaccaggtcaaccccgtcagtgccatagccagtagaaagatcagagcatacattccacctgccacatgcaagtcataccaaaaccttctccaaccttttgttgctgttattttcaggctattcttcaatgctttacgtgtacgcggccaccaaatgacaattcccgaaatcagtacaaaaacaagtaaaagcgtactgacacctacaatcattttgccccaaaagattccttcatttcccggattcatactatccagaagccagcgatgcattcggaacataaacataaaaaagccgctacgctcgctttttccttttacttcgcccgtatactggtctacatacaaagatgcacgacgtggtttggaaagactaacctgatacgcacgtccgggatcagaagatatgctgacaccggtcaccgctacactgtcaggcaatgtcgtcgccactttttcaagcaacttatccataggaagaggagacccctttaccgtttctacgtagtaaaggtcgcgtcgaaaccactcattcgcctcattttcaaataccagcatggcaccggagaagcagacaagagttattatcagtccgaaagggacggaaagccacaaatgtatctttctgaatatttttttcatgttttcattactatttcttgaaaaagcctgcaaagctttccgctcggcaggcttttatctacaaaagattctctatttaaccgactgtattattttgaaagatattccatcttacctaccgtagtgatagcgtcagcctctaccgttaaacctttgactgccttgcctgtttttgcgtctattttatagaaggccggtttctcgcccgtagtcacagtgacagccatataagcataccctttttctccataaggctcgccaccaaactttccgtcagccggcagacctgtaacaggcataatcgtctgatcttccgccttgaaaacagctaattcgctaacatctgcacttgtaccaccattaatcatatcttccgctccatttttatacaattgaagcaggaagtaatcttcagagatgtgccagcaacggaaaataggatgtttagtgcctatctcttcaaagttcacatagtaatccggatcgaaatctgttgcgcctgctttgatacgcattgcgcccgaaggcttctgtcctgttaccttcttcaaatctgaagatgaaactgccgtacgtccatatccgggagagaacacatagacgtcaccattatcagcggcccaaatagtctgataatattgtgaacgcatacgaccgcatgcatagcctattttatcagtcttggcaatcaccggagtctcattgaagttcgtgccactataaattgccacataagcattatccgggtattgtgtagaaggaatgacaccggctgtatatgcaccgctgccgctaccaccgtcagtcttagtcacaagttcctgatctgtcacagcttccggccattttttaataccgtacttactcattcccattaggatgacagatgtataaatcttattgttagcttcaaccagacctgcccatgaaactttttcaccattacccaagtaattttcggcaagcaaggtaccctcttcctgactgccatcggtcgcatccaaatagttgaacaacaatgcttgagccacattctgatcctcatctgttattttcgagtccccggtggaaacagtcaccactttatccctccaggttccataagacgtgatacgattataagtgtatgtgtacttttctttcattttaccatctgcccccagataataggaagctcctgtacctgcgccacctttattataaactaaagcaaacacataatccaatcctttatatacccaataggtaccgccaatcacttcggttccattcccttgggtcgacactgttccttcatccaaagaattggctactaccaaataacttgcttcaccggttgtggcagccaccacataagtcgtttctccatcaattggcgggttatccaccggatgattatcatcgtcgcaagatgccacaaacacaccgctactcaagcaaaaagctacggcaaaagcctgtaataaaaacttcctcatatattcttcattattgattgatactaaaaacttactcttattatttaccgaaaaatactctgaactttccatagaatgcgcgccccgctttttgcaggctaaaattgtcaaacagttgggcatcggtgaaattccgacattcaaatgatacattataacgtccattcttcatggtgtaggacaaagacagattatgagaaaactgttccggcaccatattctttgaatctttatctccgagattctcccagtaaagaggaaaatcgtgctgccagtagctatcatagccgatgctcaatacatttcctttgacaaacaggtcattccaataaaaatttgcattgatattagcataacgatagggcagattcggcatacgcactttatagtgcatgctttcttgcaaagaggaacccgccagaaacttttcgtaatcacgagtatcgatgctattaaatgttcctcctatatcaaaccaatgcgagaagctataaagcaatgacaaattataccctttggtccttacgtgaccgtggttctcataatatccgtagcttgttcctcccaatacgtccagtcctctttttatgtaatctttcgtatcccgatatatcaaaccggcctcggcatacaatccatgcttgccaaactgatgattatagctgaaactcaaattgacattatcacttttctccggtttcagattcattttaccagcttcaaggtcttcatctccaaagagttcgtccgtggtcggcaggcggaaagccttttcgtacgaaagtttcacctgaagatctttccatataaaataggtatctgccgctccatatccaagagcgcttgccgtattggacagattgatataattgcctattccatctgtattctgcgataccggtcccttgttgtattgccggtaatatttggcaaatgccgacacattccatctgtccgacggcatcagacggtaagaaagcccgctgacgtttttacgggtgattttaggaatagaaaagtccgtgaatttggaagaagcaccaatggtagagcggctcgtacgttcaaaatcactgattacatgactgaaagtaaacgtatgtgcctgtccgatatgataattcatcttcagcgtcccattccagtttctatttttagattcactgttctggtaagactgttctccccggctgcctttttcataaaaatctccacgccagttgtaagcccgcgaagcggtatcgacattattggtgatattatgattataattggcagtcaacagcagatccaggtttttcaccagtaagttctttttgtaatattctaaagaagggaccaacgaatgtcctttgcggaatttttcaccgaacacgacatcttgataaacgcctgtttgtatctctttatagaaatgggaataattgaaactcaacgccaaacggtctgcccatttctttcctaccaagccgatttttccaatcacggcttcattatgatactggtcattaaaacgtttcagatgataaatcttatttttgtcaagtggcggaaaacgtacgcttccatcttctttaatctcaaattcgcgtacataagtgtccacataataatcattatccgagaaattttgaaaagcattgacctcatacatgaaaccatttttgaacgtttgtccgaagcgcacgtatgatttatgagtattaaacgatccgtaagaataggaagcatccataaaccactttccgggttgtttgttggtgacaatattaaccactcccccaatagcatcggttccgaatcctacgggaactactcctttatagacttctatacggtcagcaaaattaataggaacattgttcaaatcgaatgcagcaccggctccttcctgtggtatgccgtcaatgaagattttcacatgttttccgctaaagccatcgatatacaattgcatatccgaccccactccacctgattcgcggagttttacaccgggcactttagtcagtgcacctgccaaagtctgcgtactgttatgcaatttcttcgcatcaatggctaccgcattaaaagcagactgattcacacggccgactccagatgtcgtgaccagcacctctcccagttcttttaccgccggcgcgatagtgacgtttacttttattctttctcccttggctaatttaactttcttttctaccgtttgataaccgatagccgaaacgacgagtgtatattattcacctgctgtcgttttcaaatgatatatacctttttcatctgtatagcatccttggttggttcctttcagataaactgtcgcaaaatccaccacttctttctctgtggacatcactctgcccgaaattaaactactacggtgacgcccctgttgtgaatatacggatacggaaaacaagaatgccagaaaaaccaaaaaacatttattgctcatctcctttttacctttttactttataaccttttcattgttctaaaagcgatgcaaaggtaagcagaaagagggatgccaaacaatccctatctattggtaaaaataagacaacaaaaatgaggtatatagatatgtacaatacctatatataagtaaatactagataatttaaataaaaaaagaaaagaaaacctacttcagccaactcgccaacgcacgttccgttatctcccacaactgctctttctgcacatgattcgtgtatttatcagacaagtttttccggtggttattgacatacagttgtcctgtcacaccagcttccttttcgtccaacagtaaaccgattgccgtagaagcccctttcttgggtttacggataaaaggacggaaaaaaatatccgtcaacggatcgaaccacttgtgcatagtgatgatatcagtagaaacaattcccggatccgcagcattgacgctaatccctttctctcgaagttgctcggaaagttcgaaagtaaacaataataaagccagcttcgtgttactgtaaacaggaatcctccaaaacgttcccgttttccctctatgaaagaaatccgggaagtcgagcttgccgattgcgtatgtacaggaaaccatatttacgatacgcgctccacgcaccatcagcggaattaatttccgggtaagcagataaggtcccatgtagttcacacttaccgttcgttcgaatccttcggaagtagtatgaaaacctgtctccatcgttccggcattattcattaacaaagagatgggaagattcctttctaagatctgactggcaaaagcaactacggattgcatggaagataagtcaatagccataacctccaaatccgggtttccggtttccttgctcaaacattcacgaacaacctccgctttcttcggatgataacaagccataatgattcgataaccggctttggctacggcacgtgttatttctgttcccattcctccgtccgcaccggtgatgattgcccatttcatttcactcattttttctccagtttatcaatttccttttgtaaagaggaaggtaattgttctttcaaatgttgatgacaagccatttctatcgtatacatacgtcctatgcaataattactgtgtccacagttgcagcgtgcttgttcttcctgtttcatccggttcacgaaccccggttcgttgagcaaagctctcgccatctgcacggcatcaaaaccggaatcgagcacttcatctattttctgacgggaaacaagaccaccgacataaatcaacggcgcatccggaagagccgcacggaatttcagtgcatcttcaaggaaataagcctctttgaagggtacagaggggatcatccatttgccaaacatacggactccgtatttcagccaccaacaattcatatagtaagacatcgaacgaatcggcatggcccctctcattacatacatcggcgctttgctgacaaaaccaccactcaacaccaatccatgagcgccaagttccaacagacgtttggccacttgtatggattcgtctatctccattcctcctttgaagccgtcgcgcatattcatttttacgaaaactgccatatcattgcccgccgctttcatcacttcttccatcaccatatccataaaacgcatccggttttcgagcgaaccgccatattcatctttccgatgattggtgtagggagacaggaattgactaatcaaatagccgtgccccgcatgtacttcaacggcgtcaaacccggctttcctcgccagattgactgcatttccatacgctttcgccatttccggaagctcctctttttccattccacgcacaaacgtaggagaatagaggttgaagcctgaagatgcggatataggagtgacaccacatatatttttatgggacatatttccacaatgcccgatttgtatacctactgcggcaccttcatcgtgcacggcttttgtcagttcatgtaaacggggaataatggacggacgcaaccacaattgacggtcgaaagaaagtccgctttgtgtcacggcagcataagccactgttgtcatacccactccccccgcagctaccgaccgatggtaatccagcaacatctgcgtgggagtattctccggacacatgctctcaaaagctgccgaacggatcgttcgattccgcagcgtcaaagggccaaaggtgaccgggctaaaaagtttagattccatagtagttgatattttatttaagtcatacgtaaatcatgatgaaaaacgcccctaataaaggaaagggaacactcgtttccgttctcccactgcgtctccgaattcttcgcggtaacggcaccaaatagcgttggcacggggaacaaggttagcaatcgtccaccaaaggaagaccaggccggaaagtgaacaagtgagtatcgcccaacctgcccattctactatctcaccgaaatagttggcggaagtgacataacggtacattcctttttgaggcagataatgccgggtgtctcccggtttgcgcaaatgtcggatgatataatccgactgccagttcaacagcatacctgcgaaaaagagcagtgtaccgataataaaccacggtgaagtgaaccaaccggcttgatacatcgtttcgggagcaagatagaaaatccattttccttgcatatagccattcagcaaattaaaaagaactcccatcgacatgattgccagcggcatcttactttttcctttcaatagcaaagggaagatgaaagcacgctgaaaatagtgaatttgaaagaagaggaagaaagtgaaaatcaccggctcgaaccgacgttcggaatagatccacatcacacacatcaccacaaaaaccggagcttccatcaatatccaggctagtttattggagatagctacgccccacgatgctgtgcggaaaataccatatccggctttcacaaagtaaagggcgataaaaacaaacaaagcaatcaggctcatcacccccagaaacagattaaaagtatctatactcataccgatctattttgtaacacgcaaaaataacaaaaatgagataaacgacgatacaaaaaatagaaagaatctgaagtacattcttttacgaacataaaaaaggagaaaatgtaaaatttcccggatgcgcttctgaaatgatcgggcacacatccgggattacttatctattcaataaaaggatttgttcttatcagcgtttcttaattgggatataagccaaatcatcaagtacatttttataagccgggcggataatccgtttaccgtcgaaagtcaattcttcattgcggtgtgcacaccagcctacgatacgtgccatggcaaacagtggagtgaagatttcctgcggcaaaccgatcatttcatacacgaagcccgaatagaagtcgatattgctggacactgtctttccgttgtttttaacccgtccgaaagtagcgatggcacgttcttctagcagttcgaggaaagcaaattcgctttctctgcctttttcacgggcaaggtcgcgagccagttctttcaatagaagagcacgagggtcggagatggtataaacggcatgtccgataccatagatcagtccggtcttgttatacacttctttgttcaacattcgggtgtagtaagtgtctatctcatctacacttgtccagtctttgatattttccttcaggtgctggaacatgtcggcaacctgaatattggcacctccgtgaagcgggcctttcagcgaaccgataccagcggcgatggccgaataagtatctgttccggtagaagaagttacgcgaacggtgaaagtggagttattaccaccaccgtgctctgcctgaagaatcaataacaaatcgagggtgcgtgcatccagttcggtatagtcttttttcagcatatacaggaaattctcggcaatagagagcttttcctgcggatggcggatatgcagagaacgtccgaaagtagcatgacgaagcatattataagcataagcaatgatagtggggaactttgaaatcagttcaatactctgacgcatcaagttatcccgagaggtatcatccgcatttgcgtcaaaacgatacatttcgagtacgctgcgtgaaagaatattcatgatgttgtttccttccaactcgatgatgttcattttcgttttctgttccaacggcatattgtcgttaatcaactcacggaaagaaagcaattcttctttatccggcagacgcccggaaagcaataggtaagccacttcttcgaagccaaagcgtttctctttgattatagcgtgagaaatatcttctacatcataaccgcgatagaacagttttcccggtatgggtttcaacccaccacccggaacacgttcatatcctactacattaccgattctggttaaacctaccaatacacctgtgccgtcttcattacgcaatccgcgcttcacatcaaacttggagaacaattctgtatcaatccgggtagcttccttcatttcctcggaaagcttgtaaatcaagtactcttttttcatctttcttcgttttttattcgttacttttgtttttcaattctttccacgatctcacgagtgaaagcggaagtagagagggaggttccattcggcataaaacgggctaaatcgtgtgtagcacgagcgtccaggaagctttgttccaaggctttctctatcagagcagccgcttctttccagtcaaaatattcgagcatcattactgccgaaaggattatagaacaagggttcactacatcttttcccgcaatattgggagctgttccgtgagtcgcttcaaagatggcatgacctgtctggtagttgatatttgctcccggagcaatgccgataccgcctaccatggccgccagttggtcggaaacgtagtctccgttgaggtttaaggtggctatcacggaatattcttcgggaatcaggagtgtattttgtaagaaagcatccgcaatgcaatcttttatcaccagtctgccatctgccaaagcatcgccaaattcacgttgcgccagttcgtagccccattttttgaaaccaccttcggtaaacttcatgatattccctttatgcaccagcgttacggaaggcaaatgatggtcgagcgcatactggcaggcagcacgcacaagacgctccgtgccctcacgtgatacaggtttcacaccgaaagaagaggtttccgggaaacggacttttgtcacgcccatttcgtctttcaggaattgatagaacttttcagcttccggagttccggcttcccattcgatacctgcataaatatcttccgtattttcacggaacacacacatgttcactttctccggtgatttgacaggcgactgtactccctgataccaacgaaccggacgaagacagacgtataaatcaagtgtctgacgcagtgctacgttcaacgaacggattccacctccgacaggagttgtcaacggacctttgattcctaccaggtattcctgaaaagtttccattgtttcatccggcaaccaggaaccagtcgcgttgaaggaacgttctcccgccaacacttctttccattcgatccgacgtttgccactatatgctttccggatagctgcatccactacggcttgcatggcaggagtcacttcggctcctactccatcgccggtaatataaggtacggtaggcacatcgggtaccaacaacgtaccatctgtttgcatggttattttgctcattttttatcttgcatttaaggcagaaccggcacgaaaccaggctatctgctgttcattataggtatgttgcacttcaaaactttctttcgttccgtcttcgtgatgaagaataatcgtcagattgcgccccggtgcgaaatggactaagcctgatacggacagaagatcgtgttcccgaattttatcatagtctgctttatctacaaaagtaagagcaagcattccttgttttttcaggtttgtttcgtggatacgggcaaaactcttagccaaaatgacacgtacattgaggaagcgtggttccatggctgcatgttcacggctggaaccttctccataattctcttcggcaacaacaatagacggaataccttcggacttatacatctttgccgtaccggaaactgttccataagtatttgtcgaacgattccaaacacggttcgtttcaccattgaaaacattgacagctcccatcagcatattgtcggaaatattctccaaatgtccacggaagcggagccacggacctgccatagagatatggtcggtagtacattttccctgtgctttaatcaataaaggcatgttcagcaagtcctgtccgtcccatgccgggaaaggagtcagaagctggagacgttgggaatccggttttaccctgatttccgtttttgctccgtggggggcaatatatccctcatttccctgttcaaaacctttcaaaggaagttcatctcctacaggctcggagagtttcactttttctccgttatgattcaccaatctgtctttcaacgggttgaaacagagatcaccggctatcgttaacgccatcgttagttccggagaagctacaaacgcataggtgttgggattaccgtcagcacgtttggcaaaattacggttaaaagaggtgacgattgagtttttccgtgtcggatcgtccgtctcacgtttccactgaccgatacaaggtccacaagcatttgccataatcgtggctcccagccgttcaaaagcctcaatcataccgtctctttcggcagtagcccggatttgctccgaacccggattgacgatcagcggagaagcaacgctcaaattcttttctgtcacctgctttgccaaagaagctgcacggctcaaatcctgataagaagaattggtacatgaacctatcaagcccacctccattttacggggatagccgttcaataacactttttctgcaaattcagagataggagtagcggcatccggtgtaaatggcccgtttatataaggttcgagttctgacaagtctatttcaattacacggtcgtaatagttggatggttcgttggtcacaatgtcgtctgcacgaaggtctgcaccaacagattcagcccaatcgactacacaatctcttccggtagctctcaaataagtagccatgcgtccgtcaaaggggaacaaagaggtagtagctccaacttcggcacccatattgcaaatggtagctttcccggtagcagaaagggattcagttccgggaccaaaatattcgataatagcattcgttcctccttttacggtaaggatgccggccaatttcaggattacatctttcggagaggtccaaccgcttagttttccggtcagacggacaccgataatcttcggcattttcagctcccattccattcctgtcatcacatccacggcatccgcaccaccaacaccgatagccaccatgcccagtccgcctgcattaggcgtatgagagtctgttcccaccatcataccgccggggaaagcatagttttcgagcaccacctgatggataattcctgctcccggtttccagaagccgatgccataacgggaagatacatcacggaggaagtcgtatacttcttcattagtcagtcttgccgtagcaatatccgcctttgcacctttatacgcctgtatcaaatgatcgcaatgtactgtcgaaggcacagccacctgatccttacctgcattcataaattgaagcaaagccatctgcgcagttgcatcctgcatagccacacggtcgggacggaaattcacataatcctccccccgtttgtaatctttcaaatcggctacatcatacagatgagcatacaaaattttctcggccaacgtcaaagggcgtttcagtatagcccgtacgtgttctacctttcctttataagcagcgtagaaagcttctaacatagtcacatcatataccatattgctttttgtttttttagtctatctattaaaataacgaacgacgttcgagtaatgtttaacaaaatgaaatattttttctacccggaacgaagatttgttacctttgcgcctattatgagtaataatccgaaaagtcccattatagaccttcagcaacagcaactcctcctgcggatggagtatgaatatgagaaggaagaatttaagcggcagaccgaaacaatgggcgttgcccgtaaagtgaagcgcggtctctgctggtatcctgtctctcttggtcgaagttactacaattcgctgaatcagcttgtaatagatattacacggaccgaaaataaagaaatagagcattcctttgagttcggccgtcctgtttgctttttccaccagtcattcgaaggaaaagtgaagtacatgaatttcatcgctactgtcagctttgccgacgaagaacgaatggtcgttgtactccccggagcgggagctttagcggaactgcaaactgacggtatactgggagtacaactttattttgacgaaacatcgtaccgggccatgttcgaggcactggaagacacgatacgcgccaaagacaaccgcctggcggaactgcgcgacattttgttgggtacccaaaagccgggattccgcgaattatatcctgtccgcttcccatggctgaacagtacacaggaaacagcagtcaacaaggtgctatgtacgcgtgatgtatctattgttcacggtcctccgggaaccggaaagacaacgactcttgtcgaagcgatttacgaaacattgcaccgggaaccacaagtgcttgtttgtgcgcaaagcaacacggctgtcgactggatttgtgagaaactggtagaccggggagtacccgtgctccgcattggaaatccaacccgagtcaacgacaaaatgctttcatccacctacgaacgccggttcgaaagtcatcctgcctatccggagctttggggaatccgtaaatctatccgcgaaatgggtagccggatgcgccggggtagttattctgaacgggaaggaatgcgtaatcgcatgagtcgtctccgcgaccgcgccacggagttggaaatacaaatcaatgccgatcttttcgacagtgcccgcgtgattgcttctaccctagtcagcagcaaccaccgcctgctcaacggacgtcgtttttcgactttattcattgacgaagctgcacaagccctcgaagctgcctgctggatcgctatccgcaaagcagaccgggtcatccttgcaggagatcattgtcaacttccgccgactatcaaatgtatagaagcctcccgtggaggattggatcatacattaatggaaaaagtcgttcagcaaaaaccttctgcggtttctttactaaaagtacagtacagaatgcatgaagccatcatgcagtttccctccgactggttttatcatggagaactggaagctgctccggaagtacgctatcgggggattcttgatttcgacactcccatgaactggatcgatacttcagagatggactttcacgaagactttgtaggcgaaagtttcggacgcatcaataagcaggaagctaacctattactgcaagaactggaaacttacatcgaacgtatcggcaaaaagcgaatactggatgaaagaattgatttcggtctgatttcgccatacaaggcacaagtgcaatatttgagaggaaaaataaaaggaagcagctttttacgccctttccgcagcctcatcaccgtaaatacggtagacggctttcagggacaggagcgagacgttattttcatcagtcttgtacgtgccaacgaggatggacagattggattcctgaatgatttgcgaagaatgaatgtagcgattacaagggcacgaatgaagcttgttatattaggagatgcctccacccttaccaaacatcctttctataaaagattgatgttattcattaaaaaggaggattaaatacttaatcctccttttaacaaagcacactttctcccgaaaccacactttttttaacacaaacaaaacaaacaatattttacatcagtactattcttaatttttcatcctcaaagatagtcgattattctaatgcactccaactatttccaccattttatttgcggatcgcgcgtttttgcccattctgcaaatttaggatatgttttatcaatgcgctgattctcctttttaagatctaaattcaaaatagaagcatccaaacgagcatctacatgaattgcaaacggaaaaccatctttgcaaatgaaataggtaccatctacatcaccacgagaaatatcagctccggaagggaaacgattattcgcaccagtcgtcggcttatgatctgtcagatggacttctgtggcagagttgaatacttttataaaaggattataaggagctaccaccactgatttatcaagagtaggattattaaattgtatggataccgtatatgtcttctcttgaatattctgattaatcatatcctccgcattcacattggatactcccaattcagctttagcatccttgaataatgttatcacattacctgaataggaagaagcttcactaccattaaccgttactttagaagctttactcaaatcgaaaggaacttcataagcaaacgagttcttataattagctcccgtccaagccaaggtgaacttatcaataatattaagaaccttattatctatattataatcaacgcttgactgatatttcatgactacatcattcaagtcataatctccttgttccggccagttatcttcaaagccaagcactccagaatacatttctgttccttgtcgatcacccggattaggaacatccggaacttcaatagcagcaataggattagaagagataacgaaagcaacatcattatagtcattttcaccgtttttccagtcttccatagtgataacattcactctatcacctgctttattttttgctgcaaaaattgcagtgtgagaaattttgtcactattcaaagatttggttgagtagaacatattcccattagccttggcatttacccagccattattccatatcaagaaaccaatctttgtatttgccggaatacgttccgggtccttttgagggaaattaccagtctcatttatatattttaaattaactgcaaccccactataataacctaaactatttccatgtgcgttaggaaatatgacacatgcatgctttgttgccttccttatttcatcagtagaagcatctttcggatagcaataataagcaaatacacttttcgctcctgtgtctcccccaaaatagttaataacgacatttgcatcttcttttatcagaatatcagcattatcagtaactaaaggtcctacgttattctttccttccggaaaatatgtcgttatataactcttgagagttgcatccacgttgatcttcttagaagcatccaaatagtcaggcttacctgaatttgcattccaagttcctaatacgttcgggattacatctgtaataaatttcaccgcagcccttgtttgtgcacttctcgttgatgaatccacaggagtaacatcaagaacattctcgaaggttatttttgcgctgacatccgaaccgacaactttagttttatacaaagtcggcacaccaaaatccggagaataaatataaacttctgaaactgctgtcgggaaagaagccggtttgatataacgtccttgtatatctgtaaatccggttgcaatgtgtgacacccctgctttctttataatctgaccgccttctgccacataagaaagcggattttcagcataaacttcaaaataagccctaggacattcctttccataatcaatattcaattgaatatttttagtagtggcaaagtcgaaatagttatctaaagtaacttcttctttatctcctgaattagcaggatcatatacatctttctgtaaacagcttgagaaagcaacagaaacaacactgataacacatgctaatttagcaatgttaatcattctttggggtaagttaaaacacatcatacttctcgttcattttatttgatagtgcaaatataaacataaacttgcatattttaatcacattattgatatatttttcaaaaaaaagtttctgcaagcttcacctacccatttttaaatatcttattaataaaagaaggagaaagcaaaaagctctctccttcttttaaaacttgtataatctggtctaattaattattctccggacgaagtttacgaacagttacagcagtctgccacatttcgctttcgcgtaattgacggagctcctcgtttaacttttcacgataatcaggttgtgaattactatcaatagaaatctgtgcttcgttaccagtcttcacgctattatacaacttttcaactaccggtttgatagcatcgtggaatgggcccatccaatcgagagcaccacgttgagcagtagtagagcagttagcgtacatccagtccataccgttctttgcgaataacggcatcaatgactgtgtcagttcttccactgtttcattgaatgcttcagaaggactatgaccgttttcacgcaatacttcgtactgtgccagcaacaaaccttggatagcccccatcaatgaaccacgttcacctgtcaggtcagaagtagcctcacgttggaaagttgtttcgaacagataaccggaaccgataccaatacccagtgcgatggttctttcgtaagccttgcctgtagcatcctgatagatagcataagaagagttcaagccgcgtccttcgaggaacatagtacgcaaagatgtacccgaacctttaggagcaaccatgataacgtcgatatcagcaggaggaactacacctgtacggtcgttccaagtgatagcaaaaccgtgtgagaaataaagagcttttccggcagtcaggtaaggcttgatagtaggccatactgacattactgctgcgtcagacaacagacacattacaatagtacctttctcacaagcttcttcgataccgaacaaagtttcacccggaacccatccgtctgctactgccttatcgtatgtttttccttcacgttgaccaacgattacattgaaaccgttatcacgcaagttcagtgcctgtccaggaccctgtacgccataaccgattacagcgattgtttcatttttcaatacttcacgagctttttccaatggaaattcgtcacggattactacagtttcagtagtacctccaaaattcaactgtgccattttctttttgtttttagtttttgatgacttacgccatctgtgttattaattgattttatattctcacatttattcaaatatcactttcgagcggcaaacaacttcattgccattcttcttcacttctacgtgaaactcgtttgcgttcacttcatcgcagaagaaagagagttcatcaccaaaatagctttccgccacatacgccatttcaaaacgacggatacgtttggtcttatacaattcaatcgggaacaaatcaaggatatgctcgatgtaacggatgctgtttacatgaccgttgatatctatatcactgtattttgccgtcagggtagctatcggctgatcgcttgtcactttgatgcgtgaaggcttttcaatcgggcaaggctcatcacagacatagtctacgatacttcccccatgcaaagtcaacaagtcggcaggcttgcgggtattaagattaatcattgcccatacggaacgtgcgtagccaatcttctttccatccttatcgaggatagcaaaattacggtccgtaaacaaacggtagacattttccacccacgtctgaaccgagaaattctcatactgataaggcatttcatccaactcaatagccagacgtgaaagcacccatgtataattgtcctcattcagcgttgcaataccaaaaccacggtcattggcgtgaaaacctgcacaattcagcagatgatttcccagtacccccatggtcaaacgtccgttgaagtcaacatggaacggttctgccacaaactgataagtccctattctattttcttcactcattattcttattggtttttactttggttatacatagcttcccgtccatcgagaaactcattcacccgttcaaagcagctggtagtaatcgctacacgtcccgaacgaacaaactgcaaaacacaattcaaagccttcagttcaccatagagcgaagttatatcttcgctcattccatttttctcgacaatagaaaataccggattgacttccactatacgtgcattgtatctacgaatcagcttggatgcttccggattctcctgaaaagcaggagtagacaccttatataatgcaatctcgtggaaataaatctcatcctctgtgaaataatgtgcctgaatcacgtcgatcttcttttcgatctgtttcactaccttctcaatgatgtccttatcagtccaggctgttattgtatacttatgtacacctttaatagaagaagcagatacattcagactctcaatatttatttgccgacgggtaaatacagcagttacctgattcagcaacccggctatattctccgaatgaacaatgattgtatataacgttttatcactcataactctaattttttaaatgcgaactctcaactctccattctcaactctcaacttctcctagcactccagcaacatctggtttaccgaaccacccggaggagtcatcggcaaaacattgccttcttccaccacgcaagcttcgagcaggaacggtccgtccgttgccagcatttcagtaatagcttccttcagttcttcacgagtgaaaacacgcttggaaggaatatcataagccgaggccactttcatataatccggattcaacatcggggtaaacgaatagcgacggttgaaaaacatagcttgccactgacgtacgtttccgaggtaattattgttcaggcagataatcttcaccggagccttctgctccataatcgtacccagttcctgaatattcatttgcagtccgccatctcccataaatacgcatacggtacgttccggtgctccgaaagttgccccgatagctgcgggaagcccgaagcccattgttccaagtcctccggaagtaatgatactgcgttctttcgtatatttaaagtaacgtgcagatatcatctgattttgacctacatctgttaccaaaacagcttcatggtgagtagcgtcacttaccgcacgtaccacttcccccatgctcaaagagtttgtggcaggatgaagttcaggacggattactttttcctcctctactttctcatattctttgaagctatcaatccattcggtatgagtgttctttttcaggagtttcgtcacagaagccagtgtttccttgcaatctcccaatacagctacatctacctttacattcttattaacttccgcaggatcgatatcaaaatgaatcacttttgcctgtttggcataagtagccaaattaccggtcacacggtcgtcaaaacgcataccgacagcaatcagcacatcgcatttattggtattgatattcggtcccagattgccgtgcatacccaacatacctttattcaacggatgttctgtcggcaaagccgaaagcccgagcagcgtacaacccgcaggcatatccgctttttcgataaactcgcgcaattcgctctgtgcatttcccagttcaacaccttgtccaaccaatacaagcggacgttcagcgttattaatcagttcggcagcagcctgtacagactcctcgtccatatcgggaacaggaacatagctacggataaaatcgactttcgtcggttcgtatttcgttttctctacttgcgcatttttggcaaagtccagtaccaccggccccggacgaccactacgagcaatgtaaaacgcacgtgctaccgcccaggctacatcttccgcacggcgaatctgataactccatttagtgattggctgggtgatacctaccaagtcaacttcctgaaaagcatccgtcccaagaaagcctgttcctacctgtccggcaatcaccacgataggcgtactatcgatcatcgcatctgcaatgcctgttaccgtattggttgctccgggaccgctcgtcaccaggcaaacacctacatcacccgatacacgggcataaccttgtgcggcatgggcagctccctgttcgtgacgaaccaagatatggttcaatatattttgatgatcgtacaaggcatcgaataccggcataatagagccaccggggtaaccaaagatggtagtcactccctgatgttccaaggagcgcatcaaagcctctgcacctgttattaaatctttcatattagttgatagttgataaatgataaatgatagttgagaaatgacagttgaaaatgaatggtttacaatcattgcgctaagtgctgcgcagctaactattacctatcaactatcaccaactatattatataattctcactgctcccttatcggcagagcttaccatgctggcatacgccttcaggctctttggtacataacggtcacgagtgacaggagtcatcggacgggctgccagttcttcatccgtcagtcgcacgttaatcttccgggccggaatatcgatttcgataatgtctccgtctacaatttttccgatattgcctccagctgccgcttcaggagaaatatgtccgatactcaatccggaagttccaccgctgaaacgtccgtcggtaatcaaagcacattcttttccgagatgacgggattttatataagaggtaggataaagcatttcctgcataccgggaccacccttcggaccttcgtgcgtgatgacgacgacgtctccactgacgactcgacctccgaggatgccttcacaagctgcttcttgcgaatcaaatactttggcaggtccggtaaacttccagatactttcgtctacacctgctgtttttactacacaaccgtcttgagcaatattgcctttcaatacggccagtccgccgtctttactgtaagcatgttccaagtcacggatacatccgtttgcacggtccttatccagttccttatagtacataccttgtgaaccaagtacgagattgaatttatttccggctgcgctcgaatatttcttaattgctttttcgctcacattcgggctggtgattgaatattcattaatagcttctgccagtgacattccgtctacccggcgaacggatgtatctatcaaaccgccctttgccagttcgtccataatggcaatgataccaccggcacggtttacatcctgaatatgatatttctgtgtattgggagccaccttgcagaggcaaggagccttgcgggaaagcatgtcgatatcatccatcttgaagtctacctctgcttcgtgagcaacagccaacaagtgaagaaccgtattggtagatccccccattgctatatccagcgtcatggcgttcaggaaagcctgacgggtagcgatgctacggggaagtacactttcgtctccttcttcataatataattttgcatttttcacgatcagttccgcagcgtctttgaaaagttgcgtacggttttcgtgtgtcgctacaatggttccgttgccgggaagagccagtccgattgcttcattcaggcagttcatcgagttggcggtaaacataccggagcagcatccgcaagtaggacaagcattttgctcgatattcgctacttcctgatcgctaacactttcgtcggccgatttaatcatcgcatcgatcaaatccaggtgctggccattccattctcccgcttccatcggaccacccgatacaaatacggcagggatattcagacgcatagccgccatcaacattccgggagtgatcttatcgcaattgctgatgcataccattgcatctgccttgtgcgcattgaccatatattctacgctgtctgcaatgatgtcacgtgaaggaagcgaataaagcataccgtcatgtcccattgctataccgtcgtcgatagctattgtattgaattccgcagcgaagcatcctagcttctcaatctctgccttcaccagctgaccgatttcatgtaggtgtacatgccccgggacaaactgtgtgaacgaattgacgatagcgataatgggtttacccatctgattcttcttcatgccgttggctgcccacaatgcacgggctcccgccatccgacggccttgtgtactaaacgaactgcgtaattgctttttcatttcaatctatcttttaattaaagagccttcctcacacaagtgagaaaggctctaaattctatcttttatggtacgaacacatacaacacaaaaacctttctcacgctcttgatgggaccaccacgacgcgaataatatgcaggactgctaggttaatagatgtatgtaacatattcatatcttcttttctttattttcgtgctgcaaaggtaagggcttttttattatatccaaacaaatcgaagaaaaaaatcacttaaaagcgaataattgtaagaaaagagaggtattatttctctattttatcacttaaaggttgaatttacaactattatctaactgcgcgcctcactttctttttctgacaaaagcacttaataatctgaaatttaccctccctataccggagtacaagcaaataattcgtatctttgtagacccgtatttacgggaattattaatcagaaacaaaaaagatcagatggaaacagtagaaaacaagtacattaccgttgcatacaaactatatacaatggaagatggtgaaaaagagttgttcgaagaagcaaaagcagaacatccctttcaattcatttcaggattaggaacaacactcgaagatttcgaaaatcagataactgctctttctaaaggtgataaatttgattttaccattccggcagataaggcttacggacaatatgacgaacaacacgttattgacctccccaaaaatatttttgaaatagatggcaagtttgatagcgaacgtattaaagaaggtaacatcgtacctttgatgactggcgacggtcagcgcgtaaatgccagcgtagtagaaatcaaaccggatgttgtagtagttgacctcaatcacccgttggctggtgccgacctgattttcgaaggtgaaatactggaaagccgtcctgctactaacgaagaaatccaggaattggtgaaaatgatgagtggcgaaggtggttgcggttgcggatgcgacagctgcggtgatggctgtggcgacgactgcggttgcgaaggcggacactgtcattaattgaagtattaagtataaagtattaagtattaattccgtgcggatataaccggagttttaatacttaatactttttttatgccgtcattccggctaatacttaatgcctaatacctaatacttgatacttaatacttaaaatcagcatcctttgtgcgtcatgatgtcaagtaccattttatccgtttcgttcatggcttgcgagccgattcttgtcaggttacggatactttggtctacatcttcatctataattccttctacggaagtcacacaacggtcttccattgccatcatggcagacagtacggctgtcgaaactccggtggttaccttcaaggcacaactcggttttgcaccgtcacaaatcattcctgtcaaattggcaatcatgttttgaacagcgaaagcaacctgattgtagtttcctcccattaaccaggtgattccacaactggaacctgtggcagctaccacacaaccacacaaagcagacaaacgtcccaaactttgtttgatatatataacagtgagatggctaagcattaaagcacggatcagttcttcttcactttttccgttttcttctgcaaagacaacgacggggagtgtagcggatatcccctgattaccactgccggaattactcattacgggaatcatagcaccggccatacgggcgtcacaggcagccgacgtataagagaggatatgagaaaacacgctatcccccatcactttatgctcataagttccccgaagcattttccctaaagaatgtccgtagttacctttaaaggcttgctcggcagcagctttgttcaaacgggctgtgtcaaggatgaaacggatttcatccagcggagcagtcagtgcaaagtcatatactttacgcaagtttagttcgggcgaagcctcttcctcttcctcgctgactgtttgttgcttgtcgagcaacgtttgttcatctttggctatatatataaaggtagtatgtccaccggcaatgatggctttagccgttttatcttccgttttacagatcacttcgatataaagcttttccgtaatatcttcttttagagaaatacaaatccgtttttctgcgatgaattgttttccctgttccaccgcttccggcgtacaatccctcaacacctccaactgataatctgatttgccaatcaacgcccccaaagcaaccgctatgggaagcccgaccatacccgttcccggtattccgactcccatggcattctttaatatattagcacttaacaggacttctatcttttccggtttcgctcccagtgtttcggcagctttagctacacaaagcgctactgcgataggttccgtacatccgatagccggaatgacctccttcttaatcaattctataatttgccttctttctgattcagtcatggacttataagttttggttccacaaaaataagaaattctttcttttccaacattctataatgaacaaataaaatctcatattgttataaaatctcccatacaccaaactttaacagaaagaattgatagaaaaatgaaagcaaaacacatagttgtttatttgctactagctattgtttcctcttcatgtatccgcgaagaagctctcaatgcagaagcagacatattaagttgtatactaccgggagtagccatgacaaccagtcctattattaacaataattccataactatctttgttggtccgggaactgatatttcagaactcaagcctgaatttacactgactccgggagctgcgatcagtccgcttagcggcacggagcgaaacttcaataccccacaggaatatactgttacagctgccgatggtgtttggaagaaaacgtataccgtatcagtgatcgacacggaacttgccacaaactataatttcgaagatacactgggcggaaagaagtactacatatttgtggaacgcgaaggagataaggtcgtcatggaatgggccagcggaaatgcgggttatgccatgaccggagtagctaaaacagccgatgattatcccactttccaaataacagacggaaaagccggcaaatgcctctccttagtgacacgcagtaccggattcttcggccagatagcaggaatgcctattgcggcaggaaatctgtttatcggctctttcgatgtgaataacgctatgagcaatcctctgaaagcaactaaattcggcctccctttccggcatgtacccacttatctggctggttattataaatacaaagcaggagatcagtttacagaaggaggaaaacctgtgaacgggaaacgggacatctgtgacatatatgccatcatgtacgaaaccagcgaatccgttcctactctcgacggaacgaatgcattcaccagtccgaacctgatttcaacagcacggattaataatgccaaagaaacgaacgaatggacttactttaaacttcctttcatcactctccccggaaaattcatagataaggagaagctaagggatgggaaatataatatagccatcgtgttcacctcaagcctggaaggagatcagtttaacggagcaatcggaagtacattactgatcgacgaggcagagttaatctatcgctcggaaaattagcggaatttcgaagaagaattttccatagcaatacgctgataatgcgctcaaacaatgtactcatacaaaacgtacacattatcaaacaaacggaattaaataactttataacaatcataatgataaaaatctatccgtatatattcagtttactagcctgtataggaatagctctccccggctattcacaggtagaccgaaatgaaacactgatccgttccgcccttcacggactggaatatgagattaaagcaggtttcagcattggcggcacagccccgcttccccttccggtagaaatccgttcgattgacggatataacccgacactggccatcagcatagggggcgaagtaaccaaatggattgccgttcagaacaaactcggaatcatagtcggactccggctcgaaaacaaagcaatgaccaccgaagccaccgtaaaaaattacaatatggaaattctcggacaaggaggtgaaagaatcagcggagtatggacgggcggagtgaaaaccaaagtacataccgccggactgactatacctctaatgactacctacaaactaagtaaccgatggaacatcaaagccggaccttatttctcgtatctgctttcaaaagaattttcaggtcatgtgtacgaaggatatttgcgggaagatgatcccaccggtccgaaagtagaatttaccgacggcaaaattgcaacctacgatttctcggacgacttgagacatttccagtggggattacaggtgggagccggatggcgagctttcaagcacctcaatgtgtatgctgatctcacctggggattgaacgatatatttaaaagcgattttaatacaatcacttttgcaatgtatcctatctatttgaatataggttttgggtacgcattttaagtctcaccacagattacacagattacacagattaacacagattgatttataagtcatagactatcaatataaataatctgtgtaatctgtggtgaacaagaaattaatttccaccagactctgccacctgtttcactccggagtaggtcacctttacagtctgttgcaatgtaggcactttcacgttaatggtcatgtctgcatttccatcttctaccgttcctgtaacagttacaggacaagtacccaaagcagcggcatttccctcaaacgtaaggtcttgctgtccggtaaatgtagacacaccttcccctttcttcacttcacacttatcaacaacaatatctccaaacttcagaatctgttgattgatgaacaattcaaactccttcagttcaatcttcacttccgtattgctgacctgcgatagggtaataaacttctctattccatctcctatgacaatttcctggtcagaaccatccggtatcatggatatatccagatttccccaatacgttccgactacatccggagccgttatcacagcttcctcttcaggaggattcccattatccttgttatcactgtcgtcatcgtcactgctacaagcagcaaagaaagtaagagagcagaccaatgccaataaatacaatagattctttttcatacgtctttggtttagttattataataaattcgtcccttataaactaaaaagaagaaaaaaggttcaatatgcttcctttttcgaagatatttcgagttcacaactttcttatcgaaaactttgttatatttgcatatagtaattttaaaaaagccacaactatgtttaattcatttggcaatatctttcggctcacaagtttcggtgagtctcatggaaaaggagttggaggagtgattgacggatttccggcaggaattgtcatcgacgaagaattcgtacaacaagaacttaatcgtcgccgtccgggacaatccattcttaccactgcacgtaaagaagctgataaagttgagtttctttcaggtatttttgaagggaaatccaccggatgccctattggttttatcgtttggaatgaaaaccaacactccaatgactacaacaatctgaaaaatgtatatcgtccttcacacgctgattacacgtacacagtgaagtacggaatccgtgaccaccgtggcggcggacgttcttccgcacgcgaaacgatttcgcgcgtggtagccggcgcattggctaagctggcactccgccaattgggagtcaacatcactgcctatacctcgcaggtaggtcctatcaaactggagggtacttactcggactataatttcgacctgatagaaaccaacgatgtacgttgtccggaccctgaaaaagcaaaagaaatggcagaccttatatataaggtaaaaggtgaaggcgataccatcggaggtacactgacctgtgtcattaagggatgccccatcggattgggacaacctgttttcggtaaacttcatgctgccctgggtaacgccatgttaagcatcaacgctgccaaagcattcgaatacggtgaaggattcaagggattgaaaatgaaaggttccgaacagaacgatgttttctataacaataacggacggatcgagacgcacaccaatcactccggaggtattcagggaggattgagtaatggtcaggatatctatttccgtgtagtgttcaaaccgattgccacgctgctgatggaacaggaaactgtcaacattgatggcgtcgacaccactctgaaagcacgcggacgtcatgacgcttgtgtattacctcgtgccgtacctatcgtagaagcaatggctgccatgaccatactcgattattacttactggataaaacgacgcaactctaatgaacgagattcagaaatacatagcggcacacgaaccaaagatgatggatgacttgttcagccttattcgcattcccagtatcagtgctctgccagagcaccacgacgatatgctggcttgtgcggaacgctgggcacaactgttattggaagcaggtgtggacgaagcattggtaatgccctcacagggcaatccggttgttttcgctcaaaagatcgtgaacccggatgcaaagactgtattaatctacgctcattacgatgtgatgccggccgaaccattggaactctggaaaagcgaaccgtttgaaccggaaatacgtgacggacatatctgggcacgtggagcggatgatgacaaaggacaatcgttcattcaggtgaaagcatttgaatatctcgtcaaaaacggattactgaagaataatgtgaagttcatcttcgagggtgaagaagaaataggttcacccagtctggaagctttctgcgaagaacataaagaattgctgaaagcagacgttattctggtgtcggatacgagtatgctaggagctgaactgccctcattgactactggtctgcgcgggctggcttattgggaaatagaagtgacgggaccgaatcgtgacttgcattccggacatttcgggggtgcggtagccaatccgatcaacgcgctttgccagattattagcaaagtaacggatgccgacggacgtatcactgttcccggattctacgatgatgtggaagaagtgccgcaaaccgaacgggaaatgatagcccatattccttttgacgaaaagaaatacaaagaagcaatcggtgtaaaagagcttttcggagaaaaaggatatagcacattggaacgtaacagttgccgtccgtcttttgacgtatgtggcatttggggcggatatacaggagaaggttctaaaaccgtactgccttcaaaggcttatgctaaagtatcttgccggttagtaccgcatcaggatcaccataagatttcgcaaatgttcgcagattatattcttagtatcgcacctgatacagtacaggtaaaagtgactcccatgcacgggggacaaggatatgtgtgcccgatttcacttcctgcctatcaggcagcagagaaaggtttcgagatcgctttcgggaaaaagccgttggcggtacgccgtggcggaagtattcccatcatctctactttcgaacaggtattgggaatcaaaaccgtattgatgggatttggactcgaatcgaatgcgatccattctccgaacgagaactgctcattggatatcttccggaaagggatagaggcagtcatagagtttcatcaggaatatgccagacgataaagcggataaataacaatcaagttataaacgatacatataaaagagtggtgaacaagcttgattacaagcatttgtccaccactcttttatatatctatcacactgacaaattacatgaccggagtctcgaaaaggaaggtaaatgattggctgtctttcaaatccttcactgcatcacctgcataaatttcgccctttgtcagagacagtttcttaatgccggctttcggactaaaatcaattttcttcaaatccagccaaaacaaattcggagtcagggtagattcgaaataatataccttattcttctgatcggatacggaacgccaacgggtagaagatatataaggcttctccggtgtattaataccaaatggcacggaaacattacgcatcacactcaatacgctggaaactgcaatctttgcatccgcaatttggggaatggcatgaatgtagaatgaagcccgtacaaaacggtcgcttgcccgattggttccgggtaacatctgtaagccaccgatttctttccagtaatcattaatggccaactgctgttcatatcgaggagaatttgtcatcacccggtattcttttccttcgtgaatacttaatttcccatccagatattccaatacagccgtattgcctgtttcatcggttatggccagatgtaaggtagactccggtcctccattcggcatacggggagcatcaatgcggaaagtctcctttttcaattcatccaccgcttcgcgtaccgtggcaaagttatcaagcacatactgtgtccaaatgctgatgcccattgccggacgggtatcgccgggaagagagtaaatggattccggcaagaaaagcaggctagccactaatcctttctcgttcattccgtcacaagtacctatatcatatcctgtagcaatcacacttccatatttggaagtccagttcacagttttctctttgttatgtcccatacgttggataccacgcggaaatacatagatattcgtcatgatatcttccttccagtccattgtacgtcctgttatcaccatctggtcagggcctatatacactgcacgcgtacatgcttctacaggctgtatactcatcaaagagacggcagccaacaccaatgcaactcctgctaattttttcttcatgttcattctatttaaataattgatcttcttatttataaataacaaacgcgccacgattattgcctaaaagaaagaggattttaatgaaaaaaaggcatttattcaatgcaggaagaaattttgggttttcaacgtatgagggttatcatcacaaagatcatttcttagcgaaaaatattaaataaatttaagtgttactattgcagtcattgctactttagttcgtccaataaataaacatacaattatcatgataaaagggtacaccaaacaaactataatcatttgctttctattacaaggaatcgcattatcaagcagagcgcaagaacaacaaatgtggcaacgataccacgataaatgtcgaagagaagcaagtattattgacactctcccctccaaattggaaaaagccttgcattggtcgccgacaataaataaagaacaaaaagaggttatacgctatatactatggaatatggtttatgtggaaggtggtacagccaatctcggagacaacaacaactatcccgtggatgtagcctcttttttcatcaaccgatatgaagttagtcaggatgaatggtatgtcattatgggagaaaatccttctaaccaacacagacgtaactatccggtagaccaagtcaattggttcaacgctcaacgatttacccaaaaactttctcaattaagcggtctacccttccgtctccccttcgaagcagaatgggaatatgcagcacgtgggggactaaaaaccaagaatttcatctatgccggcagcaataatgcagaacaggttgcctggtttagagaaaaatattacaatacttacgtatccaaagaaacaggaacgaagaagcccaacgaactgggactttatgacatgagtggaaacgtatatgaatggtgtatggactggtatgacagaaaggttccttttaccggaaacatcgctccggttataagcgaaaaagatacgcataaagtgttgcgtggaggtagttattataccttcgagaaatattgtaaagtcaccagccgctacggagttaacccgcaacgatgggatattgattatggattacggctggtagtgtcactgccagattaaaagtacacaatctttgtatagtgcttacttcattttctattcattagtttgtacttttcctctagttgttgtaacgcctgcttaagctgaatcgctttttcttgagatacactgcctccctctttttcataccactccaactgctgtttaatgagcctacgggtagtttgcaatgactgttgcaatgaatcacgttgcgccattttgttactaaattgttccacaatacccgatgcttcatagatgtgtatagcaccatcaatgtctcccttctctaccaatgccatagcttgtcgctccatggccgacagctcgtccttgttgatacgtgcaaacttatcggcatagtaatccagcaacttcatacgcttatcatactcctgactgagttgtgacatctcttgttcaaaagtagcaatatctgcctgctgcaactcacgtgtcacacggagttcctgcaatttgcgttcatactcccgctgatagtaactcttgcctatgttgtagaatttgcgcctgctctgctcaatataccctttcggacagagtactactttatagagtatatctccacttgccacccattgctctacctctttgagattaacgatctccataccctgtttgctgatacggatatcaaaaagaaggtcgtccgattccatgtgaggtagtttcagtataaaagtacccgcgccatcagtgagagtaggcacaccaccttgtacaacaacctctactcctgctacaggagtaaaatcagagttcattttcacagccactcctttgagtgtaacttgagcctgaataccaagaacacatagcccacaaaaaactgatgacaacaaatattttctcatgacaacaactgaatgagtagatttagtgtaggttgatagtcttgacctatgcgatccttcatctgtttactgtaaagcaataaaaccggagcataaaactcttcacttttatacaacttacgagttttgagatgagccaccagttctttacccgcttggacatcggtatgtaaaacatgaagtgctagtatgaaggcctgctgaatgatcccctgacgggctgttcccatctgtcgcatggtttgctctgctttataaaaatcattatctagcagtaatgtcgacacccagtcatacatataggtataacattgcacttttgagtttgcatgatattcataaaataaagagatagtactttcatatatatcgagagccttctgatagtggtgagtgaagtaagccaaatctccgcatttgttcaggaactgtatttgcatataaacgcctcgaataggagattcctcggtcaaattattcataacatcagctaatttggcagtaatctctgaagcctgtttgtattgtttattctgcatagcatagtagaggcatacaaaatagtagtctgccatcagttcgtggtacatgaagagactggagcggcgcgcatcctctgcctcggtcatgaaacgatcaaaatagggctttgcctcctgtttagtgtgtatacatagcacagcctgggccaatagcgcacgggcacgtccgacagcagcatcttgaggtggcatctgattcatgagttgagagatacgattagcttcgttccactgccccagcatcatataggccatcatttgaatatactttagctgtgcaaaactgtcgttatctccctcccttttcttcaattcagtttctatggcaggagcatctgctacgacttcctgtgcccgatgacctgtgagattaagcgacagacgattgagtttattataagccaacatacggacatgtccgtgctgggtagcacacttatcactaagatcataaaaataaagagctgtatctacatgcccagtattgaaaaaaagtgctcctaaaaaggcataacaagcattgacctgcgaataaacagccttgttgtcctgacatgctttcagggtctcaataatctcttcactatatttcaagatttcataacgccccaaattgtaggcggcgttgagcgctgtgaaccatatatttatagcatattctgacgcctcggtcttcaggaaaggatgaatcttttcgatagcatcgtatgcctcattatgctgttgggtgtaatagtagcattgatagagattgtaatagaggttataataaagttcgcgttgtgtactctgctcctcgtcggggagagtgttgaaaatagccaagccttcttcatcagcatccaccgcttcgacatagcgatccagctcataataggcagcagctaacaactgatagatagtaatacgctctattttatattgagaaggattgttacgatacaatttctctatgatctcatcagctttcagataggcagctaacatctcgtcatatttctttttataattggcattgtttcctttcgccacccaatactctacctgcgtatcagctttagcatcagtcatattaagtttagcaatgtccgcctgggcttgttccagccctttcttgtcgcccatcaccccatagatagtagtcatgttttgataacagaccataagcttagattcgtagtctggtgcctgtgtgggacctaaagctaatagtatcttcacagcctctttgagcgaattgagcgctattcggcaacctttcaattttgtttcgggagtacccttacgtaccattttaaagagtacagtcgataagttgatatcaaggtttacagtaagttcggctgtagccagtatgttccgcggtaacttttcgagcaattgttgtgctttgtcaaagtagccgatactctcatccaaacggttcatatcatcatagataaggcctagtttcgtataccaatcagccaaatcataaggtgttttgctgtgctctatggctttcttgtagtaagtctctgcatctgtaaaattccgttgatgataagcaaagtttgcgtaatcggcattacggtccatgtgtgtgggactactgtcagctatcttcttgaataaatctcctgccttccggtaactctcctcaccaccttgtaacaccaatgtttgtgcatagcgttcaacagtgggtatcatactttcgatatcttcatcccactgtttctttaagccaaggtcatgagccaatcttttttccaattgtaatccttcgtatagtccgatagcctcatccagctttccctgcgtcactagttgttgtgcctgtttttctataggttccaaatagtctgtattgatagctaccagcaaaggtacataacagtctaacatctcttgtgcagtgttcagagccgcttgtatctctttccggcgttgcatatagcggtcgctattcattttaccttcctctttgagttgtttgagttgagccatggcactggtatacttagccttcgcattggttttacctatctggtagaattgctcaactctagccgtatactcctctttagcacacatatctacccgatagtttttggtaggtgcatatacccattggttcaccatatgttgattaaccaccacccagtcacgataggctatctgttgtataagtagccgctgtccctctatatgattgggtagttgtacctcaaaacagccccgcgcatcactggtagtgggtgtagccccctctatcactatatttacttgcggcaaggcttttttaccagaattttgtatcattacagtgccgcgttggctctgtgcacgtataacccaaaaagtagctgcacatagcgcaactgtaagtaggagttttttcatgagtacactgttgtttgaaggttatactattttttgcgcaaggctatgcgcatctgctcggtaggcgacggagctaccccattataatcccagatttcgaaacctgctttcatcactgtgagacgatagctagtggcttgctgcgataatggtacctctatcaagaaggaaccatcggccccagtttgtgcagaatagcccagcacttgtacacgagcatcagccacgggttgtcgttcttcgtcggtcacaacaccttgtagcacaccagcatcattattacgacagatgcttagaaaacaagtattggtgtaacttagtgtagtatctacaggcatataccccttagctttgaaacttagcgtgaagtcgtcgagccaagcatacttgcggttgatgccttcaaattccaccacctcttgcaacgtagccagttcacgggtttccactacatcggcatacttcagtgtgagcgtagctccccgaaagggcagtgtggtagatatattctccttcagttcgaccctaaacgtcacaggttgccataactgataggccagcaagaagaaagccactatcaccacaggcagcaaacaaagcagtacaaaacgtctagtacgcggtaagtctacaggattgggacgtatgaaaccttcattttccagttgcgttaactgatagtcaaagtgatgaaacagctcattgtagtcggcataagtatcacagaagtgtccatattcttgctcactgtattgttttagtttctccagtagtgccgcgccatgctcgtcgcgtttagcataaatgtaaatttttggacgtttaccaccactcgctttcacttgttcaaaagcgacttgcagttcgcgtagcgtatattgccccaaacgagtatggaaaagaaaaatcacaatatcacattggcgaatgtaatcatcgtatctattctgcagatgctcctcagaaaggtagctgggaaaatcacgccaggtacgctgttcgaagcagatggcacgtttcctatatcccttattcttctgcgaaaagtagaggtccatctgcaatttatcttcatcaagttctgccgacgaagcaataaagactttcacgtttttcatgtatctaaatgttgtgccgttatatacgaatgttatatggatctattgatcggccaatctataaagttcatatcctcccaatgccaatatgtagggcaaattataaataacatcagcatccttctctacctcctcgggatgcctttgtagtagttcgctgaaaggcataataagaggatgtagcaaaaacaccttatccttcaccttagcacgtttccagccggccaccgtacgctcggcattccatcggtacttctccatgcgcactaacagatacaaaacttgggctggcagttcttcattgaacatagattcggatatgtgtgtcggtgagcagttactccgtctgatgccatagcccagtgtgcgacaaaacacactataggcatctagttgatagcggttagcccagcgcagcggctcgcttaatttattccatagatattgcgcctggtggttcatcaaaataaagtcggcagagtggttgccataggattcatacattttcttcaatacctctttttgtttgaggctttcatcagcataacaacaatcgtataagtagttcacatacaaagccagtttgtcttgtaagatgtttttctttattcccctgtctaccatgccaaacactttgacatagcgataacgtcccttctcatcgtccaccattgacgacaaatcattattaaattcctgacggataagcacacgacactgatattgataaacttcatgcggcaagtttagtcctaatgaaaggctcaaatcgggatcatgcacacaaatagccactgtaagcatacaatgcttattttgtgcccactgctgcaggcgggtacgcatagcagtactacaaatgtcgtcatggcaatattccacctcaatatcatctatttgattctctatatagggaaattgagctttgaagtagtcttcctgtgcctccatctcgcgatctactaaagtgatgcgggtacgtatacgttcatctgcaggcaggcggtcatcataattggcataatggcagatacgtagtgcttcgagtagcaacgagcgtcccactcggttgaatcccacaataaccaaatgcacatagtcttgactggtagcgctccaacttccatcaggttgttgcgttatgcttatgggacgataatccagcggatcataacgcctttcacaatcggctgcataaaggctccatagctgccgggccaagttttcgtggagattaaaggggcgaaagaaaatattaggcttgccttctatacaaaagacttcgggcggcagattcattttctgtatattggaatatgaagggatgctgtcgaactgtacatacacaggcatcatcttgccatcagaacatttaccacgcagagcactcaccaaatgcacaatagcgatatttttagcatcgcgcccgtaacgttcttcatcacccaacacatacacttcaatagcactctctatgttcaaccgctggagttcctcaatcgactcaatgttgccaaagtaaacaagcacttgtctctctatctcgatgggtagggccgactgtatacgatggcgcactgtcgccgcctctataccgctcatcagcaagatgcgtgctgaaggacattcgtcatacagttcgcgtatcatattgatagacaattcattgaatcctattagcacataatgattttttatattacggtaggtcattcgccctgtgtataccacccccacacgccgctctataatattagagatggtagagatgagcacaccgcccagtaaaacggatcccgaaatgctgataagtcccactaatatcctgttaggccaggcagtctcttctatttggttaccgggatcgacaaagttattgtacaccacccaaagtctttctccccattcctcgtgtccatgcagttggatggaaaaaagcatcgcgataataaaaaagatagtcagcaccgtagcaatggtaacgagtagcaaggtgagctgtgacttgatacctcccgaaatggtgcgatccatgtactcttgtgagaatatcttcttgtagtagttaataaagcggttcatctgaataatttattgatagtcgtattttataagtagaacatttagagttgtgtacaaatatagtgttttttaataaactatgtagtttttcacataactattttctacaatgcactttaccttgttattgtgaggcatataatatgaaattaggtaagatacactatttctatgcaggtaatgtctctattatttaaagtttttcagtgcaggaatttattatcttttatgcactcgggtagttgtcccattacaatgggacaatagtcaccttatagaatgactaatgtcactttataaggtgatatttgtcattctataaggtgactatctatctccgaaagaatgaaaatcactaaagatacaaaattaatcagtgaaaagcaatagtgaggcaggaaatataaccatactgccaatggatttaatttattccaatacagattagaaattcttccggaaagtacatccatttctccattccgaacacccgtaagcagtcttccccttaatgatagttcctttaccacaaagtggacagggttggccaacaaaagcatctaccccacctgttgcagaaggagttgaagcaattgtagccaccggagccggagaaccgggcaaatcagccttcacttcgttcgtcgttttttccgcttttggtttcttttctttcggtgtacttggttttcgttcacgctttttaggctctttctttgctttctcttcggcttttgcagctactgcatcctgaatagtaatacgtcgattcgtattatcagaaagtacgctcatcacgatttccgaaaccatctgtttcagttcttcgagaaactggcgggcatcgtatgtcttcttttcaatttcgcgaagcttcttttcccaaatacctgtcagttccgccgatttcaataattcttcgtgaatgagctgcaccaactccactcctgtcggggtggcaatcaggttctttctctccttacggatataatttcgtttgaacagtgtttcaatgatggcagcacgggtagacggccggccgataccattctccttcaaggcatcacgaagttcatcattatctaccagttttccggctgtttccattgcacggagcagtgttgcttcggtataaggtctgggcggctgtgtccatttctcgttcaagtcgggaatgtgaggaccactttcacccttcacaaaggtagggagtacattttcatcctcttcctctttttcttcagtaggatcttttacgtcctttgcaaacacgacacgccatcccggttccaggatttgttttccggtcacccggaattctatcttatccacttctcccatgacggtagtagtagaaatcttacagtccggatagaatacggctataaaacgacgggctatcaagtcatagacacgacgttccatatccgtcaggttttgagcatagactccggtggggataatggcgtggtgatccgtcactttcgagttgtcaaatacctttttcgatttaggaagtgtagtgccggctaacggagctgtcaagacttcgtaatcacggagtcctttcaggatagcaggacatttcgggtaaatatcgtcactcaagaaagtagtatcaacacgcggataggtagctaccttcttctcataaagagactgaatcagtttcagcgtttcatcagccgaataagcgaatttcttattacattctacctgaagagaagtcaagtcgaacaaacgtggggcgaactctctcccatctttcttgccaacactagtgactacaaacggaagatcctttatgcgttctaccaatgcctcgccttcttcccggttagcgatagggtcgatacccggattatctattttcttttttccaccgttcttttcttcttccgcagcaatttcttcatcacttttgcggataagtgcggaaaaagtggtatcccgatagttggttttcagttcccagtattgcttgggttcgaaattagctatttccaactgacggttgacaatcagtgccagagtcggtgtctgtacacgaccgatagagagtacctgtttattttgaccgtatttaatggtgtaaagacgggtggcgttcattcctaatagccagtcacccattgcacgagaaagtccggcttcatagagtgactgaaaatctgtctgatctttcagcttcgcaaacccttcccggatagcttcttctgtcaatgaagaaatccacagacgtttcaccggacagcgtgcacctgctttctgcatcacccaacgctgaatcaattctccctcttgcccggcatcaccgcagttgatgatttcatctgcgttctgcatcagtccctcgataatgtggaattgtttttcgtaggtaggattctctatcaacttgatgccgaaacgtggaggaatcattggcaggctacctaaattccatgatttccagttaggcgtgtattcatgcggctctttcagggtacaaagatgcccgaatgtccaggtcacctggtatccgtttccttctatatatccttcttttctggtatgagcgccgagtacttcggctatatcgcgtgctactgatggcttttcggctatgcaaactatcattttttctcttcttgtttttacactaacagtttacaaagttacacgattatttctcattgaccgcatgaagagagaaaaaagtccataaaggcatagatcggagaaagaatgataacttcaactgaatagttttcaagatgtaccgctttctccttttttataccactccatttgatgtttgataagctatataatgaagctgcacagttctacacacgatatgtgcatagctctgtgcagcctctctataacgtttctattttaaaccggagaaatcacaaaaaagaggataatgtgtagaagcaacggtcacatctactcccgacagactttctatcacatcagcctgtgtcacatttacgttgtgactcttcaaagacacgataaagtcaaggcgacgtttcttaccactgacttcggtagacttatcggcactaagaagattccagttactcttcaccatttggaaaaattcgctttccaagtcgccctcattgaagtatcctaacaagaatgcaggtttattataggcagacagtttcgtttctaacgtttgaagggcctctatacgctttgccatatccgtatcgaagttggtactggctactacaaacttttcatattccactaccatggctgcacgcatctcgctctttcccgccatttggtatctgtctacacttacaggttcttcttttgtcagtataccaacaccgaattcaccgcctttataatcaatggctttagcaaagtaatcatgcatatttgctttctgtgccagtacgttcaactggtcgataccttccgaacgttccgtctccttatccagtccctgcaagcagacaatatccgcattcattttggcgataatacgtcctgtccggtcgtaatcaatcacgccatctgtacctttacaataggtcaggaaatagttacctatgcgcaggtcaccttctgccttcggatattcttcaagtccggtcggcttcttaaaatcacaataaagtggataatggtcggaagttattgctacgttgacaccatccaggttgtatattacattcgattttaccacagtggtaggtggagttttcaaagtaacgacaaaatcaatccgtttggtagcctgtccggtaggaaaagtgttttctgtagaactgacaacctcccattctttcttcagttccgtaaagaatgtgccattcatcaagtcctcgttaaagtcaccagccatataaaccactttattatatgttttggcaaggtctgtgagctgttttgcagattcaactctattattctcttccaaagccaagtgggtggagataactacatagttctcaaattcggctatggcagcagaacggagttcggcaccgggaaggggataagtcttcgtgctgatcggcgtccctttgaacaaaaggccattaccgtattcaccaccctggtaagcgattgacttactaaaatagtgattcatgcctgttttatccgccaaggttttcagttggtcgactttattactgcgggtagtcatgtagtccacttcctgcaggcaaacgacatcgggttccattccgttgataacagcggctgtcctgtcataattaatcacgtcatcgttaccggcacaatgccttatattaaaggtcaacactctaaggttcccctcccctttcggataagtataggaaacttcctgtttaccgtaaggtatcatattatcgaatttagagttgtccatgtcgtcggcacaggacaagttggcaaacacggttgccaaaagacatatataagaaatcatatttttcataagaatttatatttctgaatctaattaattaaagttcaatccgtcattccaaccgggattctgtgttatcacaccattggacaaagtacgttcgctgataggaacagggtacaaataatctctgtcttcattccatttcttggtaatcagactatgacagatgatataaccactttcgccattcgacaagcgaatctgctcgccgatctctaaatataaaggtacatttccggcaggttttgttcctacgtagaaacagacatcatccgtaccgtctttatctaaatcgtaagttccgggcccgggaacatagattcccagcagatcgttctcaaatagtttaccttctttccaacgcatgatgtcgtaataacggaaaccctccattgccagttcgatggttcgttcgcgacggatttcaaggattactccctgattggctcctttcacattcggataacctgtggcggcactcatcaaatacgggtcgggttttgaatttgccagttccatatccaggttagtcattcctaccctgtctctaagtaatttaatagatttattgatgtcggcttgcttcaaagtgcctagttcggcttttgcttctgcaaaattcagatacacctctgccgtgcggaacaggggaatatcgttgcacgatttattatattcatcgtagttagccgtcatcgaatattttatcaggtgatatccggtcatggtataagccaggttcggggcttctttctttgtacttccgattctcgtatatccaggggtacggatggtttgtgccagtcgcggatcccgattctgacattcctgatcgaatgtcatcgtttcataaccggctttatccgtgaaacggcttccgtccgccatcagataagaattcacaatcttcttgttcattcccggacgtcccattgtggtggagttctcataattctgcacattatgaagcacagaaagagaagcttcatagtcacgcccgaaaatcacttcatccgcttgtagatttatggaagcgaataaatccctgtaaggtgtgctgcccgatttatagagtgtatatccgctttcgttcataaaggtttcagaagccgagacacaagcattcaggtatttttcacaatcctccagtccatgatatttgcggaaagtaccctcaaacaggcagacacgggatttcagtgccaatgccgtccaccgggtcagtacatacgcattcttcgttttcggaagattggctatcgcaaaatccaggtcctccagcattttctgcatgacaaattcacgtgagtcccgggctttatacaattcgggatcatccgagtcgagtgctttgtcataccagggaatatcgccatatctcttcaccttctcaaagtagaaataagctctgaaaaaacgggcaacaccatcgtaacggttacgggcattcacttccgtgcagttatgggaatactgcagatagaaattaatatcgcgaagtgccgtaaaattccaaccgtttccttcatcgggtatgatgcgctgtccggacatttcgagcatcaagtcggacttgacaatcaaatcggacgactcggaataaatatcgacagcggacggaaccagattgttataaaactgattcgtaaataatcgcaactcatcttcagtcttgaaatatacatccggatacaggcggtctttgggtgtcttatccaaccaatcgtcgcaagacacgaaagatatcgccaacgcgaacaaccaagatactatataaacaggtttcataattcaaatattagttagtttaaaaagttacgttcactccaaaagaataggtctttgaccagggatacaactttgcgttaccatttgccgattggatggaattttctgccgatgcttgttccggatcaatgtagtcgctctttagcggagagaaggtaaacagattctcaccactgaaatagatatgcaggcgttctatctttaccttcttcgtccatacggcgggaatcgtatagcctactgtgatattcttcactctgcaataagccagattctgcaaataacggtcgttcaccactcccaaagaacggttattgccgagggcaagataccctatcggacgtgggaaataagcatcgggattttccgggctccatacctggctcaagaaatcgcgtggaatgaacgatgaatacggacgagcgtatggtccccaaaagaatacagaattagtacccggataccagtcttgatgtcctactccctgaagatagatggagaagtcgaatccataccagtcgaatccaccttgaatactgtatgtatagcgcggcaatgagtttccgattattttacggtcgcccggatcatctgccgtgttcgagccggaagatattgtatggtcgccgtctaaatcaacaaatttcatatcaccggcgtgaagtcccggattcacctgcgctgtattgataacgaagttgactgctgtttggtcgacgttatagtttgccgcttcttcgtctgttctgaaaagtccgtctactacatatccccagatatctcccaatttctgacctacataataatcactcaatatcttggaaggattatcgaatttggttatttccgatgtattatctgccaagcctacagacaggttataacggaaaggtttgtttgccagtttgaaagcatcattccaggtcagcatcaattcccagcctttggtacgcaagttggctgcattttgcttgggctcgttggctccataagcaccgggaagctttttgccggaagtttgcatacctttagtatcacgaacataggcatcggcagtcaggttcagacggttgttcaggaatccgagatcgagtcctacgttccaagtcgaaacggtttcccaggtcaggtcggcggaattcgggtcggagacacttgcataagagcctttcttctgatcgccaaagatataattcattgtaccgttggtattaatggtttggatataatcgtagtatcctacctgctgatttcccaacgaaccgtatgacagacgcaatttcacattatcaatattcttctttaaattcccgaaaaacggttcttcactgattctccatcctacggaagccgaggggaagaaaccgaaacggtgtccgcttctgaaacgtgaacttccgtcatagcgtccactcgtctcaaataggtaacgacctcctttataggagtaattaagacgataaaatgctcccaaaagcgcatattcattttgtccgccggacatagtcatcgcatctccgactgccagatttaagtcattcaagtcatcggagagcaagccctggcgggagactttgatatctttcaggcgcttggtttcataattgtaacctgccatgatttttatctgatggtcggcaatatccagcatataatcaccataaacattgaaagcctgataccaatgattggtctgcgtttctttcaactgattcacaccgcttccggtagtcagataggatatctcacccggatacttagaatatggtacatttactgttctgttcatggtctgatagttatagtgcaggtagctgtaatttgcacggacattcaggttcttcattacattgaaacttgcttcgaaagtcgtggaaaactcataccgctggtcttcattcttatgttttccataagcaaggatagctcccatgccatccaaaacagcagaattgctcaacgaagtcagatacaccgcactgccatccggattaatgggtacaaagctcgccagtgcatgattcaccgcagtattgaagttgttattaatacccgataatcccggataagagtaactattataatggtacttcgtgttattgctgattgtcagtcgtggagtgatctttgccgagattttacttctgaaattatacaccttgtatttatcaggattctgtctgaagatacccgtttggtcaactgtatttcctgataaataatagttcaacttttcatttcctccactgacactgatattgtgctcccacatcggtctgtttttacgataaagataattataccagtcgaagttaccgtaatagacgtatgtatctcttccgtcacgttggtcggtaactacccagggacgttcgggattctccgttttatcattccggcgcaaccaaagctggcggtagtcttcttccgtatagttggtataaggctttccgttataattggtataaaacaagtcgttgatgcctgccgaataatatcccctggtttcaaaatcagtagaagtcgtctgattactccatgaatatcttccatcatacgaaacggtagtcttgcgggcggagccttccttggtagtcacgaggataacaccataagaagcacgagccccgtaaatagcggccgaagatgcatcttttaatacggaaatagaagcgatgtcattcggattcaagcggtcgatatccccttctattccgtcaatcagcactaatggcgatgcattgccactgatagaattcacaccacggatattgatagttgccgaagctcccggatacccagacccaaaagttacattcatattgggcacagtcccttgcaacatctgtgaggctctcggcacgggtctgtcttccatcgctttactgtctactactgcaacagctcccgtcaggtttattttcttttgagtaccgtagcctaccaccaccacttcttccagcgtagccgtatcctcccggagtattactctcgaagatttctgcaagtcggagactttaatttctttcttctcaaatccaatataggacacaacgactagggcattgaccggaaccgaggataatgtaaattcaccatccaaattcgtgatcgttcccatagactgtcccatcacctgtacactggcaccgattaccgggtcaccgttcacatcgaccactttccccgtaacccgatgtaaaggctgcgatgggacggcagtagtattacgttctgttttctttgtgatgataatcatccggttttgtagtttatactctacatccttatccaaaacagtagcaagcacattattaacagttgcctgctgaaaggaagccgttatcttcttgttttcattaacctcgtccgttttatagataatggagtacttcgtctgccgctcaacttctttcaataccgccttcagcggctcatttttaaagacctttgtaactgtctgcgcccgtagtgactggacgcccaaacacaacagaatcaggagaaacagtctaaaaaatgagtttcttcggtcattcataattttatcaattaagttgttacaatttaaagtgatttatatttaaggatatatatattcgattgtagtatttctctgaatcgcttctataagataaaacaactcatcattcatctgcccaacccctataaaagcaaaaaagcagattatttctgcttttttgtatcgactggctttatttattcagaccactggaatatcggataaccgttcgttccttttttccaaagattcggattccaggctacgatgatattccccagttcttccgctgacttcgccactccgtgaaaagttgttcccgtgactgatgattcgtctgatgcggtaatcgttttttcattcactttgagtacaatactttcgcaggcgtaacaattctcataactgcctaatgaagcagagaccccaacaatgcgtcctacggttgacgaagcatccactccggtcaagttactccatgctgcgctgttcttgatagcaatgtcacaacttttgtcgatttgtcccaaaataccgcctacgcctcctttagttgcactgactgctccgtatgcatagcagttctcaataaatccgccgacacctactttccgtccggcaataccgcctgcttttccgccacttgccgcctgatcgctgaccgttgcatttgaataacagttctttatataactttcttgcccatcatagctatttgccaatacaccggctattccacctgccgcaccagaaccgattacttcgccggtcgtatagcagttcacaattcttcctgtcttatttccgttacctttatctttaagtccgagataaccggtaataattccaatcccctgccgagcagatgatacagaagcattcacaaagcccacattacgacaatcaccgcacaatactccgaagaaacttggataatcaccggcagaacatttgaagttcttaatgacatggctgtctccgtcaaaatctatttcataaggaaaatcaccggaaccattcaacgactgccagtcatcaatgcctgccatatcaatatcagcacctaactggaaataaactttcattcccgatttcaacacactacgcatatttctgatctgcgtagcattcattatcatataaggtttgctgtccgttccgtttcctttctcgaacaaaccgccggcaccgtctccgtcaccatcaccatttccgtcatccgtttccgttttttcgaacggaacacgagtgtatgagtccaaaggattagggtcagaacacgagattgcaacagatgccatcatcaacagcatcccaaatctgcctatttgagtaatattcatacttgatttctttacaattaaacattgagttcttatcttatatatatatccttttccttatattctactttgataggtatgatttctttcagtgcatccattacatctacgattgtctctttattacgcaacgaaacacggaacttcatatcgcccaatttctccgactctaactgaatatgcacatcgtactgacgtgaaagcttcttcaccatctctcctaacgtaatgtcatcatattcaatcctgtcttccgcccacgccattgcctgacgtgcatttactttctttcctttcaactgtcttgttaccaaatccaaagaaatagattctcccggagacatccgtatctgatcttctttataattcaactctactgctccttccagcaaggtggttgttatatacgaatcgtctgaataggcagatacattaaatttcgtaccttttaccaccacatcatattcatgcgtctttactgtaaattgctttccattctgtttagtcacctcaaaatacccctctccttccagctccaccacccggtcggctgtattaaaatgattcgaatatcttaatacggaacctgcattcagccatacaactgtaccatccgaaagctgtatcttactcttatcccccaacggagcttcgcaaacaaaaaaagtctttggcgtaaacaagtaaatagcctgttgaatacccaacgtagtaccgacaatcaatgctataacggcagcgatacgggctatcttccatataccaggtttcgactttttcaataacgggacaatcgcttcctgcgtatacatcttatgcttcaaagcttcccattcagcatctgtctccgaatcggtatcccgatgattcatccattctctctcccattgacggaacctgccatagccaccttccacctgttcgatatattcgaacagattcttttcgtcagctcttgatatgcgtccttcaaaatactgaatagacaattcacggatattttcttcttgcttcattatattcactttctataagatgtaacaacccatatttcttttacccaacctctgaaacaaaaaaagcagaaaaaaactttcctgcttcttattctttatataaccgaagagtgcattgattatttctgctccatcatcagccatgccaatatcactatatacagatccaccggatagcgttcgctgaaatgccgggagaaatattgcaaagcccttgctatatgcttttcgactgctgtggtagatatttgtagtttttctgcgatttctctgttcttcaatcccctgaaacggcttaacaaaaaaatctcacgcgacctatccggtaactgattaagcacaagggcaatctgctcctgcaattccttgtataataatttatgttctgcatcctgcataaagtctgcatagtagagtttttcttccccatccacctttgccaggtactccacccggtacttttcaacaatcgagcgatgcttcagataatttagacatccattgcggaccatagaaaaaagaagagaagtaagtgagaaggcagataacatttcgcgacgttcccaaaatcgtaagaaacactcttgaataatatcacgaaccgtttcttcatcttctataaaacgaatagcataccctcgcaaacgaggataataactcttgaacagaaactcaaaagctgcattattgcctcttttcagctctcccaataattgtttatcatccatgaaatctaccatagtttagaaatttatgcgcaaaggtacgggtcaacagttaacaaagtgatgacaatattatgaatattttttcaataaatcaaatttgaggtacttttttataaaacgccaaaaaggaagttttcaataataggatacaaaaaaagggtcagtaactgaccctttttctattaattcatggtttcccacttattgcatatacaatctgtccaataagaaagttttccttattcttcatccattaggatttccagaatctggcaagcagctttcgctaccggagtacccggaccgaagatagcagctacacccgccttatacaagaaatcgtaatcttgtgcaggaataacaccaccggcaatcactacaatgtcttcacgacccagtttcttcagttcttcaataatttgcggaaccaatgtcttatgtccggcagccagtgaagaaacacctactacatgaacgtcgttttcaacagcctcgcgagcagcttccgccggagtctggaacaacggtcccatatccacatcgaagccacagtcagcataaccggttgctacgactttagcaccacggtcgtgaccgtcctgtcccatctttgcaaccatgatacgaggttgacgtccctctttcttcgcgaacttctcggccagttcacaagcacgtttgaagtcgctatcgtttttactttctgatgaatacacgcctgatatcgttctaattattgctttataacgtcctactatctgttcgcaagcataagaaatctcacccaatgttgcgcgaacacgagctgcttccacagccaattccaacaagttacccttgccagtcttcacacattcggtaattgctgccaatgctttgtccacttcagcctgattacgtccatctttcaaacgtttcaggttttcaatctgttcaagacgaacggctgtattatcaatttcaagaatatcaatcggagcttctttttccagacgatacttgttcacaccgacaattgtctgctgaccactgtcgatacgagcctgtgtacgtgcagcagcttcttcgatacgcatctttggaatacctgtttcgatagctttcgccataccacccagtttttcaatttcctgaatatgctcccaagccttgtgtgccagttcgttcgtcagagattctacatagtaagaaccaccccatgggtcaacgttcttgcagatgtaagtttcttcctgaatgtaaatctgtgtattacgtgcaatacgtgcagaaaaatctgttggaagagcaatagcctcatccaatgcattggtatgcaaagattgagtatgccccaaagctgcagccatagcctcaatacaggtacgtcctacgttattgaacggatcctgttcggtcagtgaccagccggaagtctgcgagtgagtacgcaacgccagtgatttcgggttcttcggattgaattgtttcacaatctttgcccacaacatacgtgcagcacgcatcttggctatttccataaagtgattggttccaatcgcccagaagaaagacagacgcggtgcaaatgcatcaatatcaatgcctgctgccgttcctgcacgaagatattccaaaccatcggccaatgtataagctagctcgatatccgcggttgcgcctgcttcctgcatgtgataaccggagatagagatagagttgaacttaggcatcttctgcgaagtgtattcgaaaatatctgaaataatcttcatagagaatgcaggcggataaatataagtattacgcaccatgaattctttcagaatatcattctggatagtaccggccatttcttcgagtttagcaccttgttccagaccggcattgatatagaatgccataatcggaagtacagctccattcattgtcatagacacagacatcttgttcaatgggataccatcgaacagcactttcatattttccaatgaacagatagatacaccggctttacctacgtcacctactacacgttcgtgatcggggtcataaccgcggtgagtagccaagtcgaatgccactgacaaacctttctgaccggcagccaaattacggcgataaaatgcatttgattcttcggcggtagagaatccggcatactggcggatggtccaaggacgaagagtgtacataactgaatacggaccgcgcagataaggaggaagtccggcagcatagccaaggtgttccattccttcgaggtcttcttttgtataaacaggcttcacttcaatgtgttccggtgttttccagtcagcggagatactgttagccttttgccattcagcaccattagtcggctgaaatgcggcatatatatcgatgtttttaaaatcttttctcatcttacttcaatagtttagcgttaaactctttcaaggtatccaatacattgacacgaacatggatgaagttttcgatacctgcagctttcaggtcgtccatacaagccggagcaccggcaacgataaacatagcacgaccattcagtgctttgaaagcaggaattgcatattcagcatattcatcatcgctggaacagataacaacaatatcagcttttgcagccatagctgcctctactcctgcttctactgtctcaaatcccagattatcaattacttcataaccggcacaagccaggaagttacaagaatattgagcacgtgcctgacgcattgccaaatttccgatggttaacatgaacgctttcggacgtttgcctgatgcttctgtttcgagacgcaatgcttcaaactgactggcagcacgatcgaacaccagagtatccacctctttttcgcaagtatgagagtcacctccgcaacaacacttaccttcaacaggttgcttattgccagccttttcattgaagttcgggaattggttggtacccaacagcacttcacgacgctgtgcaactgctttatgacgagctttgttgctctcattcacagcagcctgaacagttcctgctttcaatgccgcatagaagccacctgcttcttctacagcaaggaagagttcccaagcctgttttgcaatagccacagtcagattctcgatataataagaaccggcagcagggtcgatcactttatcaaaatgagattcttctttcagcagcagttgttggttacgagccaggcgttctgagaactcgtccggagtctcataagtcttatcaaacggagttaccgtcatagagtctacgcctcctaatgcagcactcatggcttcagtctgtgtacgaagcagatttacatgtgcatcaaacaaagtaagattgaaagtagaagtttcggcatgaaccgccatttttgctgcgcaacgacattctccgttaggacctttattctcgcaatcacgcacacattcgggattgtaagaagctacaatatttgcccaaagcaaacgtgccgcacggaatttcgctatttcaaggaaataattggaactgataccaaaattaaatttgattttcttggctactatggcagcaggaataccggcatcagtcaattgacccatatattcatttccccaagccagagcataacccagttcctgagaaatataagcgcctgcattattcaatgataaagcgtttacattcagcacacgatagaaaggaagcggctgaatggcttcaatcaaagatttggctgtttgtaccatatcacctttctccttgccacgagtcagcatcttgttgaagaaatcatagttgatagaacctttcagtttcttcacatcataatctttcttctggaaataagctaccagcagattagccaactcaaccacatgcccctgacaggttgagaaattcagttcaacacactctgcctgaatatcacttaacagtgtttcaatatattccgcattaagttcttttgctttcacatggaaagaaagtgagtcaacacccttatttaggatatccagtgctttcgcattggcttctttcggacattctactctaatttcctgacgaaccaaccatgcattgttgtcttttttagttcctcttaaataagggaactctccaggaagtgcatcagtagtttttaaatcctccagatcttccatccggtaaaaaggtttcactttaaacccttcgtttgttttccaaacgagcttcttctcaaaatcagcaccttttaaatcggctgtaaccttctccatccattgttcggtggaggcaggagaaaagtctgagaagagtttttcttttttgtctgccatagtttatttaaaattaaaacaagattaatattgtctttatttttatctatctctttctaaatgtcagtcgttcgacctgcaaatataaccaataagttaaaacgaatctcttttttagggaaaattcgcacaggacgccccgattcgtcaagtgcatacaatctgcatagaaattcttcatttttagttcttcttttatttgattagctccaatgttatgagtaattttgcactcgtttttagaaaaacattataaaaactgctatattatggattggttacaaagtttattatgggaccccagctccgtagctcacatcgtgctcctctacgcatttgtagtggctgccggcgtgtatcttggtaagataaagatattcggagtttctttgggcgtcacatttgttttgtttgccggcatcctaatgggacatttcggcttcacagccgatacacacatcctacatttcatccgtgaattcggattgatcttgttcgtattctgtatcggtcttcaggtggggccatctttcttctcctctttcaaaaaaggaggaatgacattaaacctgttggctgtaggcatcgttgtgttaaatattgctgtcgcactggggctttattacctctggaacggccgggtagaactgccgatgatggtaggtatcctttacggagcagtgacaaatactccgggacttggtgctgccaatgaggctctgaatcagttgcattataccggtccgcagattgctctcggttatgcatgtgcttatcccctcggtgtggtaggtatcattggttctatcattgccatccgttacatcttccgtgtcaatatggcgaaagaagaagaaagcctgaaaatccaaagtggagattcacaccacaaacctcacatgatgagcctggaagttcgcaatgaatcaattagtggaaaaacgctgattgaaatcaagaatttcctgggccgtaagttcgtttgctcccgaattcgccatgatggtcatgtaagtattcccgaccatgaaacagtgtttaatataggcgaccagttatttatcgtctgctcggaagaagacgctcctgcaattgtagtatttatcggaaaagaagtggagctcgactgggaaaaacaagacctcccaatggtttcccgccgtattctggttaccaaaccggaaatcaatggtaaaacattaggttctatgcacttccgtagtatgtatggggtcaatgtcacccgtatcaaccgttccggtatggacctgtttgccgatccgaatctgatacttcaggtaggtgaccgcgttatggtggtaggacagcaagatgcagtggaacgtgttgccggtgtactgggtaatcagttgaaacgcttggatacaccgaacattgttacgatcttcgttggtatcttcttaggtatccttctgggtagtcttccgattgcattcccgggtatgccgactcctttaaaattaggtttggcaggcggaccgctggtagtggctattcttattggacgtttcggtcataagctgcatttagtgacttatacaaccatgagtgccaacctgatgcttcgtgaaatcggtatcgttctcttccttgccagtgtcggtatagatgccggtgccaatttcgtgcaaacggtagtcgagggagacggattactatacgtaggttccggtttccttatcaccgttatcccgctacttatcatcggcaccatcgcaagattatattataaggtaaactacttcaccctgatgggattgatagccggtagtaataccgacccaccggcattggcttatgccaatcaaacaacctccggagatgctccggcagtgggatactctacagtttatccgttatcaatgttcctccgtattctgacgggacagatgatattattagcaatgatgtaaatcaagtttagcatataaacaataaagccggctatatccaaatggaatatgccggctttatttattttttcaatctgcttttctatcctgtcatacaagctgcagtttctttactacaaattcttcaatgaaccgcactgtctcttcaattcccaaagaagaagaatcaatgcacaaatgataagtagctgctgctccccatgttttatagctataataattatagtattccgaacgtctcttatccgctttttcgatcatttcttctgcagcttccgcatcaatatgatgcatgccacacaaccgcgctatgcgatcttctttagaggctgaaataaaaacattagcgcaacgaggatgctctctcagaatataatctgcgcaacgtcctacaaagacacaagatctttctgctgccagatgacggatcacatcactctgtactttgaacaaagcatcattgctcaagcagttgttacatggcatagctccctcactgataaaagggaaacgcataccgaacagtccgccaataataccctgcgaggctttttcatcagccttttcaaaaaactccttacacaatccactttcctccgaagccagattaatcagttccttgtcgtagaagttgattcccaaacgggctgccaacttctctcctatttcttttccgccgctacctaactgacggccgatattgataacataattaccgctcatagtacattttgttttatggttctgtagcaaacatacgacttttttctaaaaatcacatcatcaaacgaaagttatatttgaaagtgactatgaaatatccttttatttcctggttacggaactcataaaaaccatcagaagaagtcgtacggccgaaacttttcctctttccgagaatatccgcccaataagcagacagttccgcttctttctttttcaagaaccgccagctggcacttgcattccacaacatctggtcatcttcgcctttacggatattcgtaccattacggaaagaataagccccgtcagtccgtaattgcaagccaaaaggaagatcaacgtacccctcaagacgaaaactataattacgcgtataggtatcgttatcattgatagaattaagcgaatactgataattccaggaagtagagaaatcaatacctccccaggtgggctgataagatacattcgcgtcacaccccaatccggtatcacgtgtcgtacttttcttcggttcgaggctcttgtcttcattaatcatactgacacgattgctatgattaccgttcatatccaaccgcaaggaaaaatgtcccagacgcttccaccagttggcacttccatatacattccagtttccgttaatattaataggagatgtctcacgtccgccggtttttgcatcatatagcactacctgcgtcacactgttctgttccatctgcccgccgatattcgcagatatacctttttttgaatgttgaaagctcacacggacactatgagaaaacatctgtttcaaatccggatttccccgggtgatatacaacggattactgttatccgtcagcggcattaaatctgataaggagggttgccgggttctaccgctataattgaaagtgatccgggcctctttctttttccaattcacccatatcataggctgaaagtcgatagtatgcatggtagtgtccgcatagagctttcccattttccgttcaatggcacgtttttgcggagtcatccctaatgaggcattaaacatccaggtatcatcagagtaattaagccccacatccagattatggccattcgtacgactatgactccgattactcaaactatccacataccctgcttcatagtcgggaggtagttcaccaaagacttccgacttcgtcagagaagataattcatacgtatcacgattatcacgctcatagttagtatcccagttatatgctacccggaaatgcatcttcttaccaataggctgggcaaaggtaatcccgactctccatgaattatttttttgaggcgacttcaaatactggttacgaaaaagcaccgaatcatttcccaatttatcttcaagacggaaataagtagttttagaaagcgaaaaactttcattatctccccacgaatccgagttcaggatattcaatgccagcgttgtacctttttcattcagacgtctcataatactcatcatccagctataacggttcgactgattctccgaacgcgaccggttctcactacgattcacttttatatcccggggaatagattcaaagtcatcaaacaagctctcatgacttatgccgggaggagcatcaaaagatgcattctggctactgttttcattcctattaggagagattcctaaattaccggtaaaatgtatacgtgtacgtttatctacttcccagcttcccatgaagttagaactaatcgaccgccccttagagttactttcgttagtagacgcagagtattgattacctgccggcaaatactgttcctgataaatggaagaaagatttccgttccggttcaaattatagttcacacttccggtcagggagaatttcttaccgaatttatgagtcatattcattcctaccgaattgttgatattatccttgtacgtactattctggtatctgttggtagactgtgcgataaaagaaagattatctccgtctttactaaaataattcacttgcccctcgaaatccttcttctggttattcccgtatcctaccgttgcatttgtcagccaggttttattcaattcatccttagtctgcaagtcgagtacatatttcttttctcctgaactaattccggtgaactcctcttctttcgatttcttatcatatactttcaacttactaatcaggtctgccggaagattttcgagtgccgtctttttatctccggagaaaaaagcttcgccatttacattgatttcactgatgggctgtccgttgtatgtcaacgaattatctttcttattatataccaatccgggaacacgcttcactaaatcttccagataagctccttcacgagttttaaaagcggcagcgttgataaccgtagtatctccctccatcactacttcctgcaattttcccgttatcgtcacttcactaatctgaatatcatcatctttcaataccactgtaccgatattcaccgatacagagtcttccaatgcccggtatacagattgcattcccataaaagagaccttcaacaggtatttctttttcttctgcggttgataattaagaatgaaacgcccattcttatcacttgttattcccttgataaaggcagaatcgcttttcgccaaaataacaatgctggcagatggtaatacccgcttctcattactgccggcttccactgtctgcactcttcctcgcacagttctcacttgttgagcatacagagcagtatgtccccaaagtagcagcaaaagcaatcccactaacttacaagcgttcatatctaatagtagttaagtctgatatttatgttgatctaaaacaaatcgggacaaagttaataacttttacgtaaaacggttaatcccggagttattttttatacctttgtccatccattattcaatcagcaacttaatgaaaaggattatactaatcacaggaggacaacgatccggtaaaagttcgtttgcggaaaaaaaagcgcatgaacttactacgtcaccggtttacttggccactgccaggatatgggacgaagaattcagaaaaagggtggaacgccatcaaaagaaccgcggtcctgaatggacaaatatagaagaagaaaaagaattgagccgtcacaatgtagcgggcagagtcgtagtgatagattgtgtaactctttggtgcactaacttctttatggagtttgattctaacgttgcctcctcattggaagccgtcaaaaaagaattcgacaaatttacccagcaggatgccactttcatatttgtaactaatgagattggttgggggggagtttccgagaacaaactgcaacgtaaattcacagacttgcaaggttggaccaatcaatatatcgcatcgcatgccgacgatgtatatctcatggcaagtggtattcccgtaaaaataaaataaacatgaaaacgtttcatattcaaaagccggatgaagctatcaaagaagctctgattgacaaaatcaataatctgaccaagcctaaaggatcgcttggaagactggaagaaattgctttgcaaatcggactgatccaacaatccctttctccacgattaactcatcctcaaaatataatctttgccgcagatcatggcatcgtagaagaaaaagtcagtccatctcctaaagaagtaacctggcaacaaatcagtaactttcttcatggaggagcagggattaacttcctgtgccgacagcacggtttcactcttaaaattgtagatgcaggagtcgattatgatttaccttatgaaaaaggtatcattaacatgaaagtcggaagaggaacacgcaatttccttcatgaagcagccatgacacctgaagagatggaactctgcctggagcatggtgcccaatgtgtggacacttctcaccaggaaggctgcaatatcattagcttcggtgaaatgggaatcggaaatacttcgtcctcttccctatggatgacttgcttcaccagaattccattagatcaatgtgtaggtgcaggaagcggactcaatcaccagggaataaatcacaaatacgaagttctgaaaagatctctcgaacaatatccgggagagcattccgcagaagaaatcctctgccgtttcggaggttacgaaatggtaatggccgtaggagcaatgctcaaagctgccgaactgggaatggttattctaattgatggatttattatgaccaattgtattcttgccgcttcacgcctttatccggaagtgatgagctacgccatattcggtcatcagggagacgagagcggacataagctattattggactatctcggagcacgtcccctactcaatctcggactaagacttggagaaggaagcggttccgtttgtgcctatcccattgtagattctgctgtgaaaatgctgaatgagatggattcatttgctcatgcttctatcactaaatatttctaagatgaaccagatacttgccgcactcatattctttacacgattgcctttctggaaaataaaagaagttccgcaggagtgtttcaaacacgttgtcaattattggagtttcagtggctggctgaccgggggaatgatggcattgattttctggggagccagtactattctacctcacggagtagccgtaatcctggcactgacttcacgtttacttatcacaggagcattgcatgaggatggattggccgatttcttcgatggattcggaggtgggacgaacagagaaagcacgttacgcatcatgaaagattcccatatcggaagctatggagttttgggattaatcatctattatttatttgcttacaatctactggtcgcacttcccttagcagttactcctttcttattactaagcggagatacctggagtaaattcatttcttccaatatcatcaattacctgccctatgcacggaaagaagaagatagcaaatccggaacagtatatacaagaatgagttttggggagatcgtaatgtctgcgatgggtggaatactacctctcctattacttcctccaagctactggcccgtatgtatatttcccattctggtattcttctttatctgccggatgatgaaacgacgtctgaacggatataccggagattgttgcggtgcattatttctcctaagcgaaatgagtttctggctgggagcagtgatgtctatctatataaaataagtaaacctatgaatatttatctaatcagacatacctctgtcgacgttcctaaaggtctttgttacggtcagtcagacgttcctttacgtcctacatttgagatagaagcagccgtaaccaaagctaaaatcgaatccattcactttgatatggcttacaccagccctctatccagatgcacccgtctggcacagtattgtggattcggagatgccacccgtgacctaagaatactggaacttaatttcggagattgggaaatgcagtattttaataaaatcaaagacccgaatctccaatgctggtacgacgactacatgaatgtaaaagcaaccaatggagaatcgtttgccgatcagtataaacgggtagccgcgtttttagacgaaatcaaacaaaaggaggctgaaaatatagtagtatttgctcatggcggcgtattgatttgcgcacagatttatgcaaagttgattcacccggaagaagcatttcaggcagtacctgcctacggaggagtttttctatatcaagagtgcccgtaaacaaacaggtgtagatatctctaataagtttgcgatgtctttaccctcacaccctgtttaataattacttactggagaattttcggttgacggcagttccactttatttcattacttgggacaaagtgtttcgcaccgagaaacgaaatgtttcaagtaatgaaacgaagtgtttcacaccgagaaacaaaatgtttcgctacttgaaactaagtgtttacctatatgaacaagccattatctgcatagattctgcaaataactacatactttcgatggatttactatatccttataaacttcaggtttaacctatcaaccaaatcaagacgagacagggtgagagtgcgaggataaaaagcatctccaaattttttctgaatctttaaggtgcagaaattctctgaagtaatcagcagaccgataaacttaatccattctgcctgcctaaggggaggatacataaataggaatgatttcggagaaaatgcaataaaaaaagaaagaatatctccaaagatacttatctttgccccgcaatgtcaatcttcggacaccgaaaattatttattcatttaaaagatacacgaataaagatgaaatctcctatttcaatcctcacatggctatgtcttcttttcctggctagttgtatatccaacaagaagacttctctcgaggctttcaaacaggatgtctatacacctgaatatgctaccggattcaagattctgggtgcggacaatgccgccagcacacttattcaggtatccaatccatggcagggagccaaggacgtaaaaatgtcttatttcatttcacgcaacggtgaacaagcacctgccggattcaacgggcctaccatccctgccggagcgaaacgtatcgtatgtatggcttcttcctacatcgccatgttcgacgctctaggtcaagtggacaaaattgtcggagtatcgggcatcgactatgtatccaatccatatattcttgcacacaaagattctatcaaggacatgggtcccgaaatgaattatgaattattattgggactgaaaccggatgttgtcctgttatacggtatcggagatgcgcaaactgccgtaacagacaaactgaaagaactgtatataccttatatgtatgtaggagaatatttggaggaatcaccgcttggtaaagccgaatggctggtagctcttgccgaattaacagacagcagggaaaaaggcatcgaaatattccgtgaaatccctaaacgttatcaagttttgaaagcgctcaccgaatcggtagagcaacgtcctaccgttatgctcaataccccgtggaacgacagttgggtgatgccttccacacaaagttatatggcacaattggtaactgatgcaggtgcggattacatctacaaagaaaacacttctaacagttccactcccatcggactggaaacagcttacaaactgatacaaaaggccgactactggattaatgtaggcatggcttctacgttggatgaattaaagacggtcaatcctaaatttgtagacgccaaagctgtacgcgaaaaaactgtttacaacaacaatttacgaacaacaccgacaggaggtaatgactactgggaatctgcagtggtacgtcccgacgtcgtattgcgtgatctgattcatatctttcaccccgaactcgtatccgattcactttactattacagacacctggaatgaaacagcctgataaacgtactccctttttattcattacactgggtatagttaccatactgttattactgatagacatggcaacgggagatacatatattcctatcaccaaggtatgggctgtactcaccggaggcgaatgtgacgaaatgacacggaatattctcctttctatccgtttcatacgggtagtggtagcggctttgataggaatagcactctccgttagcggtttacagatgcaaacagtattccagaatccgttggcagatccttacctgctgggagtaagttccggtgcaggactgggcgtagctctgttcatactaggtgctccattacttggatgggcggagtttccaattcttcagtcgctgggtatcgtaggttcgggctggataggaactgccataatcttattgggagtagccattatcagccggaaagtaaaaaacattctcggtgtattgattatgggagttatgataggctacgtagcaggtgctatcattcagatactccaatacctaagttctgccgaacaactgaaaatgttcacactctggtcaatgggatctcttagccacatcacagtcacccaactgggaattatgataccaatgttatgtatcggtttactaatttccgtagcctgtatcaaatcgctgaacctgttactgctcggtgaaaattatgcacgaacgatgggaatgaacattaaacgttcacgcatgttcatcttcgtttctaccgcactgctgacaggaacggtcaccgctttctgtggtccggtaggatttatcggcctggcagtaccgcatgtcacacgactgctattcaacaatgccgaccaccggatactggtccccggcaccatgctgacagggcttatcagcatgcttctctgcgacatcatcgccaagaagttcctacttccggttaactgcatcaccgccttactaggtgttccggttattttatgggtaattgctaaaaacttgcgtagattcaaatgatagaacttaaagaactgacattaggatatggacagcgcacgctgttggaaacggtaaatgcccgaatcacaggcggacaactcgttgccctgttaggacgtaacggaacgggaaagagcaccctgctccgtgctatgatggggctggaaaagcctcaatcaggagagattactctgcaaggaaaaaacatagcatcattgaaaccggaaaaattagcccggaatataagctttgtcaccaccgataaagtacgtatcgctaatctccgctgtaaagatgtagtagccttagggcgtgctccctataccaactggatcggccaactgcaaccggaagaccaaaagcgggtggatgacgctatgcagctagtcggtatgtccggttatgcagaaaagacaatggataaaatgtccgatggcgaatgtcagcgaatcatgattgcccgtgctcttgcacaggatactcccgtcatcctgcttgatgaaccgaccgccttcctggacttacctaaccgctacgagctctgtttgcttttaaagaaactggcacaggaagaaaaaaaatgtgtcttattctccactcatgacctcgacatcgccttatcgctttgcgactccatcatgctcatagataatccgcagatgtacacgctgcctactccggaaatggtggccagcggacatatagaaagacttttccgaaatgaatccgtcacgtttgatgtgcaggagatgagagtacgcatcaaataaacaaacagatatccgacaagaatcagactgtgtataaaataaataggtagcattcatttgtgttcctatataaattcgctatctttgccccgaattggtttcagatagccatatcaactatctgaattaaaagggaatcgggtgtaaatcccggacagtcccgctgctgtgaaactctattcaacttcttgatatttacttttaccactgaccgggtatagatagtcaaggtcgggaaggaatcaggaagggagtcagtcagaagacctgccattcatacctttatagctgtttttactcgtgggataggaaaatggcaaactgtaaaaaataatcgagtagtcatgacatcggaaatgattgaaggaggataaattctctctagctaaaatatcaaaaggacggcattagaccgtcatgctcaatgtgtgcgtatccccgcagaagtgatttctccggggttacttttagctaaactaaatatcatcatataataatcacaatggaagttctaagaaatttatttgaaggttaccccaatctttggggcggcggagtggcacactccgtactgattctgtcactaaccatagcgtttggaatcatccttgcaaaaatcaaagtgcggggagtatctctaggagttacctggatactctttgtcggaatcgtattcggtcatttcaacatgaatctggacgaacacctgctccactttctaaaagaattcggattgattctgtttgtttactcaattggtttgcaggtaggacccggctttttttcagcattcaaaaaggggggctttaccctgaatatgctagctatgctcgtagtagtattaggagtaaccattactattatcctgcacttcaccaccggaactccgattaccacaatggtaggtattttgtccggagccgtcaccaatactccggggctgggagccgcacaacaggccaacagtgatttgaatggcatagatgctcccgaaattgctttaggatatgctgtcagctatccgctgggtgtagtaggtatcatcctttccctgcttgctttgaaatatctccttcgcatcaatactgctcaagaagaaaaagaagcagaagtcggtctgggacatctccaggaacttaccgtacgccctatctccattgaagtgagaaacgaatcggtagatggcatcaggattaaagaactccgcccgttactgaaccgtaagtttgtcatttcccgcatcaaacaccgcgagggtggagaaaccgaattggtcaattccgaaacaattctacatgtaggggatatcatattagtgatctctaccccgattgacgtggaagcaattactgtattcttcggaaaggaaatcaaaatggaatgggaacaactgaacaaagagctcatttcacgccgtatcctgattactaaaccggaattgaacgggaaaacgctttcacaactcaaaatcagaaataacttcggagcaaacatcacccgcgtcaatcgttcgggagtagacttggtagcctctccacaattacagttacaaatgggagaccgtgtcaccattgtaggttccgaactggctgttgcccatgcagagaaagtacttggcaactccatgaaacgcttaaatcatccgaacctgattcctatctttataggtatcgctttaggatgtattctgggaagtcttcctttcgcatttcccggaattccgcaacctgtgaaactaggattggcaggcggtccgctcatcgtttctatcctgattagccgtttcggtccgaaatacaagctgattacttataccaccatgagtgccaacctgatgcttcgtgaaatcggtatttccatcttcctcgcttgcgtaggtttaggagcaggcgaaggctttgtagacacagtcattcatggcggaggatatatatgggtaggctacggagtaatcataaccatcctgccacttctgattacgggattgataggacggtattattgcaagctgaattatttcacgcttatcggagttctggctggttctaccaccaatccgccggcattggcttactccaatgacctgacctcctgtgatgcgcctgccgtcggctacgctacggtgtatccgctcaccatgtttctgcgagtattgacggcacaaatattgattctgtcgttgggataacatattaatatatcctttttccatccaattgattattaacaaatggggaaaacagaatcagatgccggaatatttgttattggtcagtgggatatttttttagaataaaacaaactaattaataaaaactttctaactttgtgccattaaggtttccttaaacaacttttgcgttgttaaggaatgaaaagggaatgccgtgtaaaccggcaacagaacctgctgctgtaaatctccgctccttgtaatcagagagcaaaattgcaacacgaaagtcactggatagtttatctgggaaggcgttgcaaaatgggatgagtcagaagacctgccttgatgctctgatttacacctgcgggatttcgggtagtagtcaaatagaaaataagcaattatcttttatttggtataatagctatatgtccgtttgtgtagattgaattcagatctgaacaaacggattttttatacctataaaataaaagacatgctttctattcaagtccattcatacaataagcattgtatccatttacggtggatattatgtttgattctatctctatttaccacagtaccagccatttcccagtccagggttcggcatcagacttctctgtctgatacacttctcaaactcaaagaagttactatctacagcaaccggatgcaaaaaaagatgtctcctgtacagattctgtccggcaaagaacttgagaagctaaatgtttactccgtcgccgatgctttacgctacttttccggagtacagataaaagattacggaggtattggaggactaaaaaccgtcaatatacgaagtatgggcagtcatcatgtcggagtattctacgatggtattgaattaggaaatgcgcaaaatggagtcgtcgatctaggccgtttttcattagataatatggaagtcatttcactatataatggtcaaaaaagtgccatcttccaacctgccaaagattatagttccgcaagtgccatatatatgcagacacgaaaacccctattcaaaggggaaaagaaaaacaacctgaacatcggggtgaaaggcggttcattctctaccatcaatccgtcactactttgggaacatcgtttcaacgaacgaataagcagttccatcagtacggagtatatgtatacatcaggacgatataaattcacatacgccaagaaagatggttacgacacaacagctgttcgtcaaaatggagacgtaagaatgttacgtttggagaatgcattcttcggaaaaatccccaaaggagaatggaaagccaaagcatacctatacaattcagaacgaggataccccggagctgcggtaagagaagagccgggtaagtttcgccatcaggaccggcagtgggataccaatctgtttgtgcaaggctcttttcaaaactattttaagccttggtacagtctgctagccaacggaaaatatgcttatgactatctccactatttatccgatcccagactggatgtcaccaccatgtacgtagacaattactaccgacagcaagaaatctatgcttcggccgcccatttattcaccatctatccctggtggagtatgtcattatccaacgatttccaatggaatacattacgggccgatctcatagattttgtctatccaacccgtaatacaatcctgacttctgctgccacgtcctttgacttcaaccgcctcatgttgcaggcgagcctgttatatactcatgtcgacgacaatacacgtaccaaaggagccaatgcaggcaccaaaaacaaatacactccgtctgtcatagccacctggcaaccattgaccaagctccctctgaatgtacgagccttttataagaaagtctttcgcatgccaactctcaatgatttgtattatacttttataggcaataaggacttaaaaccagaatataccacccaatacgatgtgggtatcactttctctcacacctggaataaccattggctgaaaagcctggacttacaaatagatggttactatagtgaagtagatgataaaatcattgccatgcctacctccaaccagttccgttggactatgattaatctcggacatgtggaaattcggggattagacgcagccatacgaggagaatggggcttcggaaaggtggaacttagcactctcttcaattacacctatcaaaaggcacaggattttaccgatcctaccagtgaatggtatggaggccagattccttatataccttggcatggaggttccatcatcctcaatggaagttaccaaacatggtcctgtaactatagtttcatttatacaggtgaacgttatgaagcagtcgccaatatcccggagaactacgcacagccctggtatacccacgatttttccctatccaaaacttttcaatgggggaaaacgggaatacgtgtaacggcagaaattaataatatcttcaatcagcaatatgaagtagtgcaatgctatcctatgcccggtacaagttttaaaatcaaattaaacgtcatgttatgagaatatctgttctatccatcattatctgttttgttcttctatcgacttcttgtcgcgaagatgaacgcattattccgtcaactcccaaccaagttactcccggagtaaacggtacctctgtcaaaggtttctttctactcaatgaaggaaatatgggaagcaacaaggctacccttgattactttgattacgaaaccggtatctatcataagaatatctatgcggaacggaacccgggagtcgtacaagaattgggggatgtgggaaatgatatccaaatctatggaaataagttatatgccatcatcaactgttctcatttcgtagaagtgatgaatgtagaaacagcaaaacacatcacgcaaatttccatacctaattgccgttatatcgtctttaaagataaatatgcatacgtcagttcgtatgcaggccctgtcaaaatagatcccaacgccagactggggtatgtagcacgtgttgacactaccacactgactgtcaaggatacctgtgtggtcggctaccagccggaagaaatggtgattgtgggcaacaaactctatgtagccaactccggcgggtatcgcgtacctaattatgaccgcacggtatccgtcatcgacttgaacacattcaaagttatcaaaaccattgatgtgggaatcaatttgcatagaatggaattagaccaatacggaaatatttatgtctcatcccggggagattattatgacacttactccgaaacatttgtaatagattccaataccgataaagtagtcgatgaattaccgcttcttcccaatacagaaatggctatttgcagagattcactgtatgtatacagtacagaatggagttattacaccaacagttggacagtctcttacgccatctataatacaaaaacaaagaaaactgatacccgcaattttattacagatggtacggaaaaatctatcaagataccttatggaatagcaatcaatccggaaacaggtgaattcttcgtcaccgatgccaaagactatgtgactcccggcacattatactgtttctcccgggatggaaaaaagaaatggtcagtcatcacgggggacattccggcacatattgcctttacagataagaaactaaaagagattcaataattcacaattctattaataattaaaaacaaaagcaatgaagaaaattctatttttactgctcactgtcgttacagtatgcagttgctacaatgacgatgatctctgggataaagtcaatgatctcgacggacgaatagaaacactagaaacaacagtcaagaaaatgaactctgaaattacaactttacagagtttggtagacgcattaaatcaagggaaagtaatcaccaacacggaacagacatctgatggctacacattaaccttcagtgatggaagcaccgtatctatcaaaaatggaaagaatggtacagatgctcctgtgattggagtgaaagctgacgaagacggaatatattactggaccattactaccaacggtactacagaatggctgccggatgcaactaacaagttaaaagtgacaggtacaactccagttatgggagttgatagtgacggatactggaccgttgatacaggcgaaggagccaaacgtattaacggaacagacggaaaacctgtgaaagcggaaggacaagacggagactctttcttcaaatctgttacagttaatgacaatcatgtactagttactcttgcagatggaacgtcgttcacattgcccaaaggggaaacatatacatttgacattgccaatagggattataccttgttctcgtctaatgaaacaaggacgtatcttcttacaactgccaatatagacgacgcaacattaattgctattccgcaaggatggacagcggttcttaatgataaagacttaagaatcacagctccggcagtttcaggtgatgatgtcaaagatggtgaacttaaaatacttgtcactccgtccaaagctttcggtaaagtaataaaaatgcaattaagagcagtgcgtgaagcacacttcttgacattcgaggatgttgattataaaggtgatgctaacatggtaggagaaagaaactggtcatcattaattgacagccaacaatatggtggcccactactttatcctaagaataaccaactctataactggagtgatgcaaacaacacttttcttgcttccgaacttcctaacggatggggtgattaccaatactggggtggcggacacgcaatttccaattatctggatatggatcttactcatggagacttccagcaccaactagccgtttattatcaggatgcaaaaactggttttggaggacataatggttccaaaaacttctgcgtacattacggctatgcagacaattccggatatgccaacggtccattaccctatatttactttggagacggagttgctcgtgtagttgaccacatgtatgtgactatgacgacctacctagccaactgtgtggccaacggtaacggtttgaccgcacccgcaggcaaagatgattgggtgaaactggttgctatcggttatgatgaagatggaaaagaagtagctacacgtccggaattttatttggttggagccgagggtaatatacttgaatggacaaaatgggatttatccgcattaggcaaagtggtcaaaatagactttaatgtcactggaagtaatgataacggatatggtttcagccaacctgcctattttgcttatgatgatgtagcagtgagattctaatgaaacatattatactttttttatttgttctgttagcattaatatcatgcgtgaaagaagaggaggactctcctcttctttccgctcctgtcattaccttgaaagaagaatcctccatctataaaacaaaaattggtcgggagataaccatcgctcccatttatgaaaataccgattcggaaacgacctttaactggacaatagatggaaagagtatctgtaccacttccaccctgacattttcagccgatgaagcaggcaggtatttcattctgatttctgccaccaatgccggagggacaacagaaaaggagatacgtatcgatgtctttcaacttgatgtacctactatctctattgcggatgccgacaaaggtttcaaagtgcttcaaggctctgaactaaccattacacctatagtagattcttttctggaaaccagttactcctggcaaataaacggtgaagatatttcgaacgaattaacctgtactctccccacaatcgagcttggcgaatatcaagttcgttttgctactcacaatgaagatggcgatgacgaagtaactttcaaagtagaagtttgttcaccggatcaagtagatttcaactggacattcctgcaaacggaatataacatgtcagccggcagaactatccgtatcaaaccggttgacgtgaataatgcactggatgcagtctatacatggaccgtggacaatgaacaagtgcaatccggagaaaatgatacttatctgtttacatccgagcagcagggagaacacacggtaaaggtcgaaatgaagaactcatatatactcgctacgcaaacattaaaagtcaatgtttgccctcccgcaggaacataccagcggaagattagcgccacaagttctgcgtcaatgaacaaagtatatgaatatttaccggctcccggtcaattcatcaatgagaatcataacacaataactatggcagaagcctgcacctatgcagaagaacgaatcaatcagacggcttatgtttccctaggcggattcggtggatacatcatcgttggattcgatcatagtatcgtgaatgatggagattacaacattgctattacaggaaacgcttttgatggttcgtcagaaccgggaattgtatgggtaatgcaggacgaaaatggtgatgggttacctaatgacacttggtatgaattgcgcggatccgaatatgggaaagccgaaacctggcaggactatgccgtcacctatcataaaccaactggtattcagcttcccaccccatggacagacaatcatggtcaaagtgggtctattgattatctgggtgcttttcaccggcaagattattattatcccgcctgggtaaaggaaaaacaatatactttgcgaggtactcgcctgaaagagcgtaattacgatcaatccggtaatggtacttattgggtaaatgatagttatgaatggggatatgctgataatttcagcgccattgatcgtctgacagatgatgacaactataatgccggaccgtctgacaatcatttcaagatatcccatgctgtaactttcgacggtaaggatgcaaacctgaagtacgttgattttatcaaagtacaagtgggtgttaatagtaaaagcggttggttgggtgaaatatccactgaagtttttggaataaaggatttcaacatgctcaaataattgatagaatatacataagagattcttttccctattaaatatagagataaaaattaccaaatggtaatttttatctcctcccataaccctacctttgtcgccattttcaacgacaaaggtagaaagttatgaaagatagtattgatttcggcagtatgaacatctccacgttgttccgtaagttactaattcctacggtacttgggatggtattctcggctctgttcgttattacggacgggatatttgtaggaaaaggaattggcagtgacgcgctggcggcagtaaatatcactgcaccgctttttatgatcgcagcgggtatcggactgatgttcggagtgggagcttcggtggtggcttccattcatttatctcagggaaaacgcaaagtagcaagtattaatatcactcaggcaattgctttttccgcattgctcatacttatcctgtctgctctgtgcctttattttatagagccattagccagattattaggtagttcggaccgattgttgccgttagctgtagaatatatggcatggtacattccttttctcgtattctacgaagtcttaaatataggtatgttctgcatccgtctggacggttcacccacctataccatgatgtgtaatgcggttgcagccatactcaatatcatactggattatatattcatcttcgaacttggttggggaataatgggagcagcttttgccaccagtctgggaactgtcgtgggagggttgatgacactgatttacttactccgtttctctcgtaccctccatctatgccggataaagttaagtatcaaaagtctgttactgactcttcgcaacatcggttatatgattaaactgggaagttctgcttttatcagtgaagcctccattgcctgtatgatgtttctggggaactacgttttcatccgccatctcggtgaagacggagtggcagcattcagtattgcctgttacttcttccctatcatcttcatggtctataatgccattgcacaatccgcacagccgattatcagctataacttcggagccggacaacccgagcgtgtacgaaagacactgcatctcgccattcggaccgctttaatctgcggtatcagctttttcattcttaccgtactatgctgccaagacatcgtttcgttattcattgaccgcagctacgctgcatttgatatagcagtaaacgggcttccttatttcggagtaggattcattttctttgccgtcaacatgattggcattggttattatcagagtgtcgaaagaggtcagcgagcaacaattatcactcttctccggggagtcgtatttatgttgatgggattctttgcgctccctccggtattgggtataccgggtatctggctagccgtaccattggcagagttattaaccactttctatattttcggaatttatttgaaagatcgtttcattgtctgccgacgataagtatctttgcaatatgagaacattcattgaaaaactttgcgatagatacaaggtatctgaaaccgatgtacagtctctactgaactatatggaagaggtacatttcaaaaaaagagatttaatagtacgcgaagggacaaagaactgtaatctttattttatcaagacaggaatatggcgagcctattatcataaagacggagtggatactaccatctggtttgcttcagacggagaagctgctttctccgtctggggctatgtagataatgcctactcattaataaatattgaggtcatgtgtgacagtgtggcctattgtatttcccgaacagctctgaatcagctattcgcctcatccatcggactcgctaatttggggctccgcctcatggatcatcagtttcttcaacaggagaactggcttatcagctcgggaagcccacgggctaaagaacgctatctcaaccttatcaaagagactccggaattattgcaatatgtacctttaaaacatattgcgtcttacttgtggataactccgcagtcgctaagtaggattcgggcgaagatagcatcttctccgcaataatactaggctttcgcggtcttcaccccaaaagcacaataagtcaaataacacacacaagctaaagtgacaaaaacgcctccgataacacctactgttccaatcgcaaacccaataactggagtaactactccgccaccggcaacagcagtaatcatcaaccctgaaatttggtttgctttttccggtcttgcctgcaaagccatcgaataaatgatagaaaatacggatgacgcaaagaaaccgacagcaccgatacaaatcagatttaccatatcgtttttcacaaaggccagaataagcaaagagaaaatacaggcaacaatattcacacggaaatattttatttcagcgatacgggccaacaagaaagcacccaataaagcacctaccgtacgacttaaaaaataaacttgtggagcaaacttcacttgttctgtcgtccagtcaaaacgttctgccatcagcttagaactgataaagttggtggcaacatctacccccacaataaagaagatacccaaaaacaacaacagaatcgttttatccttcaataaagaaaaagtatcactgatagaaagttgctgggttgcagcactggaatcttctcgcttaacaggggtagccatcaaccaaacagcggataataatgtgataaaacctaatatcgggaagcaataataccatttgtcgtctccaaagtgagctacagccaacaatacaatctccggtccaacgagagaagatacagctttgattacctgccctgccgtcaagctactagtcaataaacgttggctagttaccacattacttaacaacggattcagtgaaacttgcagaatagcgttaccaattcccaagagagcataagctatcatacaagtcgcgctattataaacgatcaatggtaataacatacccactaccgttattcccatactaagaagaactgtatttttacgtccccatttgttcatctgatttccaataggaatacctaaaaacaggaaccagataaatactaatgaaggaacaaatcccgtcatcacaggagaccagttgaaagtacgttgaacataatcggacgaaatgccgactatatcacagaagcccattacaaagaacccgaagagaacgggaagggcggcataaatagagttttgtgttttcatgtttaactcactatattataaaatgtagaatccccggtgccattgtcaagcgacatcggcaccgaggtaaataagctgtttattcagaacaatgaggcggattttccactccccatttttcattcggttgattacccattgtgagtttcaatgttccacctttatagagttcatcccggtacatccaacattgttccagcggtttaccgttcaacgtagcagattgtacataataggcatccggtgtattaccagtcgtttcaatcacaaacgtttttcccgtcgcattcatcggactaagtttgatttcaatcttatcaaacaacggactgccaatctggaaagtcggtcgttcacaagaaccgccctgtacatcgaacaatcccattgccgccatcacataccaggctcccaactgtccctgatcttcatcctgaccgtagccataaccatgctctccgtttgttccgtaaaactcatcacaaatcaagcgcgtccatttctgtgtcaggtaaggtttaccggagaaattgaacaaccaaggaatatgaagacttggctgattaccatgattgtaaggactctccacacctgcaaaagcataagttatcttaccgccaccaaaaatagatttacgcgcttcggtaaatatagaatccaaccgattattaacctcctctttacccactttttcaatcaaacgatatggatgttgaggaacaaaaaatgtatattgtacagcatttccttcctgaaatcctctccatgactccagcggattaaagttatcaataaactcaccgttaggaactctgggacgaaccagtttcaatgaatcatcaaatagtttttcccatcctcttgataattccatcaaacggttgtaatcatccgtatgccccaatgctttcgcccactgcgccacagcataagcactaaagcaatattccaatgtatgagaaacagaaaaggtagagccatccggatgtgtgccataatgaacactgttctcataaggtacatatcctctttctacaaactgcttcacatccatcttacctgccccctcaatgcggccttcccagcctaattcattctttaaagctgcctgataagccgtttcaacatcaaaatcacgaataccactattgtatgcacctgccagggtaatactcaccatatttgtccctacgcccgaaacatatctactggcagcaataccatcacctaaccagccagcatctttgtataccagcaactgactgttaactaatccattgtagtattccggataagctagtgcccaaagagaagtcaagttccagtaagccccccaaactgcatccgtattataatgattatatatcggcttaccttcttttcccaaaggtatctgccctactgttccatcatttttgggataagctccattaacatcgctagcaagtcctctgcccaacaaagcgtgatacaatcctgtataaaatttgattttgctttcatccgtacctcctgaaaccagaatacgtcccaaggattcattccatttatccgtagttgactgtaaagcttcattaaaaatcaagtctttcgcttccgtttccagattcagtttagcattttcaatggaagtatatgacaaaccgatctttacatttactacatcatcttttttcgttttataattcaggcacataatagctcctgcacctttgatttcatttcccgctttcagagtactatcttgataaaaaacctctaccgattcaggaatacgatctagttttgcataaaaatacatagctactgatgaacccgcttgatatttcttcacatattccggttccgtaatcacgtaaccttcaatagtatttccatctatctgtttgatatatgcatcacgcacagctccactttctccctgacgatttccaatattcaaaagaatatgagcagcttccgtctccgggaaagtatatcgctggaatccgacacgagcagtggcagtaagttctgcctttacctggtaatcctttaataatacagagtaatatcccggacgcgccgtttcatctttcttatcaaagcgggaacggaaacctttatcggggtcttccagttttccgggatttgtttttacttctcccgttacaggcatcagtgaaattcctcctatctgaaactcatgtaagcaaggaaagccatcaatcgaagtatgattatcttcataaccaatagcttcccatccttgattattaccgtaagttccattggtagaagctcccagtttagccattccaaaaggctccgcagccggagtatagaaaaaccaacgactatgtacagttccaatattaggattcacatactctaccagattgggacgatcaggtgttttgcaccctacaacacctgccagaatcaacaggctacctatccattttaatttcatcatttatttatttttctgtttgtaacttctcctttaatcatcgccacacgtgcataatactccggcacacacgaagcatccaataaccatttcggcttacgtttttcatcagtccgccctgtccagtcatgatacatcagtcccgcctggtcacgtgcatgttcccaagcataatccagtccttttatcatcgtatccacatactttgaatcccccgtaacattgtacagatcgtgataacctctaaacaaaaccagattaaaccaaggcaaatctgcaatataaggaataccgtcttccgtatacttaaaaaacactttgtagcttccttctgccaaaaatttagcattatccagatatgcctgctcacccgtataattatataaagctacagctgcttgtaacaaagtacccgtattataagtatacaaatccgggcatactgctgaagtagttgttagccatgaattccaaacgactcctctttccggatctttcagatatttatcaatccaatgatagaacttctttcccacctccagataatactcatctttagttgcttcataaagttttaaagccaacaccatcgcttttccgttagaacaagcaggtttctgatctttcactccttccagccaggaaacagctccttcaaagttctcatcccagccacttaaaataaaggtcaatacctgtttcgctttctccagataatgaggatttttagttaccagataagaatcaatataatcaatacccaccaaaccattgtcatcataatagcggtctacctttccaaactgaacagggtaagcctgataaccaaaaggaacacgcgttgtatcatagtaacgttccatcgccatcaccatcgaatcgacataaaccgtatatttctccggttcgatggcagccatcaacactgccgaagaaaagacaccactcataggccacagataagaaacttcctgcgcttgccgggtggaatcattaaaataagtcagatcaggacgatgactgcttgggtaatattcagagaagaggccgtatttgggaacccggtagagttcccaaacacgctgaaacatttcttctgccttatctttattcggagtcgtttttgattctccggcacaagaaagaagcacgaataccgtcgatacaaataaaactatatttctaattttactattcatatcctattcctctgtcactgtttctcctttgtacaaagcaatcattcccaaagattcgagcgcagcatcctgcatcaacaactgttcagcacgttttggagttgctcctgtccagtcttcatagaacagtccgtttgataaacgggcattttcgtatgcataatccagaaagttgatgaatgttttgatataattgcctgcatttttatagtaaggctcaatatcaataaatgcacggatcagttttgttgtgaaccaaggatcatgatcgggataagccaacgccaacccattaagcggacgtacaaaataattatacgcaccttcggaagaagcaatggcactgtccagataagtctgttcacccgttattttgtataaacggaccccgttagaaatcatcacacctgtattgtaagtccattttgttttattaatggatccgtctgcttgtttatcattccagtaacatccatcttccggatcacgcaagttagtcaacgtccaagcatataaacgttttgccagagccagaacatccgctttttcctcttgaggacatacagaatgatattcaagcaagaatagcgttgcatatccattagcacatgtcggtttattcgaatcaccaactccctgctgtcctttctggtcctcattccaccaaagacctcctccaaacgtatcatcttcaccagcttgcaggaactcaacgattcttttagctttcgtcacataatcttgattatttagcaaattaaaggcctctaccagttcaatccccacaatagaattatcatcataaaaacgtgttccactaccggtagtaccattggtttgagagccataaccacccacagttccattaggagtacgataataaacttcaaaccggtctaccatatccgcataattcacatcataacctaaagcatgcaaagctgctgctccggaaaccagtccgtcatacggccacaagaaagaagcggaattatccccatctttcttaggataattttcattatacagtccttctgttgccccactattgatccggtagcactgattaatcaagtcaaactgctctttggcacgtttatgataaacgacctcctctccgggttctgacggagcaatcggtgtaggcgggatatatttctctacgtcatctccggcacaggagaataatagtgccggaagaatagctaaaatagtctttatctttttcataacttagttttattaattaatcggagtcacattagtaaatgtatgtatcatcaatccatccgaattcgtatcgatagtgatagttgcatgcgtataatccagactacctttcattttccaaagatgatcccactgactccattggaattcatacaaagcatagaaagaagcaggttctccacctaccggacgttcggcactcacgccatcacctctaccccaacacatatcaccaccatttacttttgctaaaaagtagtaacgttcttctatccaacttaaccaatcaggagcaccggtttccggtttggacggatcaaggaatcggatatcaccctctcccacaaatttaccatcacccgcatactctaatacagctatatctccaaatgttgctccccaaatacaacgaacagaagaaccgattttttccgtggtcattgccattgtattaaagttcactgtcagacgggttacttcttcggaagcagttacagccgtttcgccctccccttctcttaacttcgagctatcatcaatataatagctgaatgtttcacctgtagtagcagacttaaatgatatatttcctgctgataacttcgtataaatctggaaaacgccctcttctacacaacggaacggaattccaccctgtccactgttctccgtagccgaaccatataaatacaattcagccggaatattatcaattccctctccacgagttactgtgatggtagccaccttgtcggttctcttcaccactccacctttcgaagcgtttactgtccattttatatctccggtttccaaaggataaatgcctgcatttctagcaatcgtattaatagccgcatgagtgattgacaaactggttgcagctcccaaatcgcttttcaccgtagccagcggctttgaaaaatcaccgtctgccttatcaaacagcacctcgtacaatacaattccgccatctgccgcaccacctcctgaccacgacaacacaacaggcgttggagatgacacattcaactggatagaagcaggggaacttaattccgtggggactgcaaaatccgtgttcaattcataatcttcctgacatgataccattgccagaagtgctgaacatatccataatatctttttcataattattcctttttgagtcgtttaaccaattaccaattcggattctgctccaaattaccattcaagtcacgttcagcctgtggtataggccacaaataatgtctatttgcattaaaggttctgttttcaacccgaacgtatccatcatccgtacctaccacatcatttgtctttagtccgtgacaccatccattcaatacattgtccgcaattctccaacggataatatctttatgacgatgtccttccaatgccagttccgaccgacgttcgttccgcacaatctcaatcagtttatctttagaagctccttccgggaattccagtgctgaagcaagtgtaaatcctgccctattacgaatgggtttaatagttgcatcccaagccgtcttatccagttcccccaactctgccaatgcctctgcattcatcagtaaaatatccgcgtaacgaatcaaaatcggattcaagccagaataaagagtagcacgatacgtattatcccaatatttcttaatataataaccggtagccgaacagtctgaacctaccccataaccatctttgccttcacctttctcacagttgataacaacttctgttccgtcggccaacgtatatgagtttccagtgtacatcaccgttgccttcaaacgtgggtcacgattagcatacggatgactttcatcaaacgatgttcctgtttccttaattgtttttccatccagcataatataactgtctaccaactcctgcaaaggagaaagctgggaatatccacccaaagtgggcggcaggaaaacatacatcatctgatgttcacgactagtcggacgatactgtgcatccaaaattacttcagagttgtattcattagcgatctcaaacaatcctgcataacttccaaagagtttaaagcctccctctgtcataatggtagaagtaatatttttcacttgcgtccaattaccttcaaacaaatagattttagctttaatcgccattgccgcccaacgggtaatccgacctttattatccgcatcataagaagtcggcaaatagttaccgttaatcacttcatccaaatcagccagtatatttactattacagtggctttggctgtacgtgcaatagacatactttctttgatagaaagcacttttgtagtataaggtatatcgccgaatttcgtatacaactcataataactataagcacgaagtacttttgcctcaccaatataacgtttcttcaattccgggtccaaatcaggaaccctgtctatattttccagcaactggttacacatacgaatacccgtatagcgcccgtcccaaacctgtttcacgtaagagtcggctgtagaatatgaaccattaccaatattttgtgtaaaatcattaggttgcttggtataagcattatccgtcattgcttcacaataaagctgttcgtccatatttcccaaataggtatagcaagtattcaacgccttgacagctgcttcaggatcctcttcccaataagtcaagtccgtttctctgtcatacggtgccgtatccaagtcaacacaagaggcaccgcccactaccaagacagcagataaaatcaaattctttatagttgttttcatcacggtacagtttaaaatttaacattaagtccaaatgaatatactcttgccacaggataagaacgaccactaccgtctccggtatattccgggtcccatccgcctttcatcttcgtgaaagtcaacggattctgcacactggcaaagattcttaaattcttgacatagagttttttcatccattgttgcgggaaagtatatccgatctgcgcatttttcaaacgcaagtatttagcatcctggatccagaaatctgatttcgctgcattattagcagattccgcacccattgtcagacgaggataagtagcatccggattattcggagtccagcgatcttgatggaaatccattacaggaccttcattgttattatggaaagcctctacagattcaccacgcatccacttgttacgttttcctactccttgccacatcatcgagaaatcaaaacctttatattccaaaccataggtgaagccgaaagtatatcttgggaagtcattaccaacaataaaacggtcatcgtccggtttaatcacaccatcgccgttcttatccaaataacgaatatctcccggtttcggtgtaataccttccaagtgcggtcctttctgacattcttcctcattctggaaaaatccatccgaacgatatgcatagtaagagtacaacggataaccttccttgataattgtctgtacatccgagccaccgataatttccgtaccgcgtgtatctattacttcattaaagctatctgaaatatttccggcgaagttatgcactaccggaccggtcttcaaacgataacttactgataattcccatcctctcgtctctaccttaccagcgttctgaatcggggcaccattaccaaacaatccgggaaccggtaaatttaccaaaatatcttttgtacgattattgaaacaatcaaaagtaatattcaaatcattattcaacaatcccaattcgaagccgatattagccatacgggtagtttcccatttgagatcaggatttgtagaagcaaatgtagccgtctgcgccaatttatctccgaagctgatgccgttagtcacagacaccgtctgcatgtattgataggcaccaatgcggttattaccaaccaatccccaggaacctctgatttttagagaaggaacatacggtttcagtacagaccagaatttttcttccgagatacgccatcctgccgagaaagacgggaagactcccgaacggtttcctttcgcaaaataagaagaatagtcattacggatattaaattccagcagatatttctcatcataattataagtggctcttgcaaaaccggaatagatagcccagtcacttgccgaaccaccattgctaactttatccccactcaaatcacctacaaaaatatcatatttagaatcctccgtcaaacgactagtagagaactgcttttcagagaaaccctcataagcatatcctaataatccaccgatagagtgtttccctattttcgtattataagtcaccataagattggtagtgatattcttagaacgatagaattgctcggtcaacttattttcactatctcccgtaccttcgaaggccttccggttctcatgcaaattattattccaaacacgtccaccggcacttccgatcagtttcagtcctttatatacttcccattcggcttgtatggttcccaataattcatcattcacattctggcgataaccgccttcttccaaacgctgcaaaccgtttgagttacttccggcaggataattataactgccatcctcattcttgatcggataaatcggtggcatgcggtttgcctgctcgataatccattccgtccagtaagcatgttctttaatatcattacgggcaaattgagaagtcaaattcaatgtaaagttattcgtcaccttatggcttacattcagacgtgcattgtagcgtttataaccataatcaggtcccttgaacatactgttctgatccatataacccaaagaagccatgtaagacaactggtcgttacctcctgtcatcgaaacattgtgtgaactttgaggagaattacggtgatacagttctttcacccaatttacattcggaccgccatttctaaattgcgcaatctgctcgggagtgaattttgcagctcttcccgaattgacagcagcttcattatacagttcagcgtatacccacgagtctgctatcttaggcaatgaagtaggttgctgaacaccatacataaaatcataagagatttccaccttaccggcttttcctttcttggtagtaacaagtaccacaccattggaagcacgtgaaccataaatagcagtagaagaagcatctttcaaaatagaaatctgctcaatatcagccggattcaaattgcccagcgatccttcaattccgtcaataatcaccaacggatcattgttgttcatcgtattcaatccacggatattaatagaaggtacactacccggagtagaacttccctgctgaataaccaaaccgggagtcgttccctgcatcgcttccaatacattggaaatcggctttccttccaattcatccgtagaaacagaagacacagctcctgtcaggttgactttcttctgcacgccgtagcctaccactaccacatctttcaaagtaaccacatccgacttcaacaccacattgataaactggcggccgttcaccggaacttcctgtgtttcatatccaattgaggaaactaccaataccgcttttgaagcaacattcagtgaaaaatttccatccatatccgtagccgtacccgtagatacacctttcaccagcacggtagccccaatcacgggttccccgtctgccattaccttacctttcactgcgattgtattagattgcgcatacagtttggaaccaacagccacattcatacaaacaatcaacataacagccaataattgccaactcgaaaatgccgttctgaaaagccggcgggcaaattgcgcgttcaatagattagattgtttcataacattttatatttgaattaatagaagagttatcatatattataagatattaagttgggacaaagcaaaggaataagcccctaaagcaacggctctgcttgctcctaatgtagaaacagcaatgcctattttcttgtgacaggcataatgcacctctctctccgaaaatggtattttcaccatcttgtctttttcctccagaaatttatcaaatgcctctttttcggacagattgaacacctccatctgcaaacaagggaaagaagctcctgcaaacgtgccaatctgccgattcatctcattcataattcccggaagtatgtatttagccgctcctgccactcctccgccaatcactaccaagccatcaacaatattcaatgcacggatgatagcatcaccggccatctctcccagttcgttaaaactccggacagcagcctgctgatctccctctgcagtcccttcggcaatatcatatatatctttgggagttaaagaagaagcatcctttccggtcaattcctgatatactcgcctgacagccctgatactgacactttcttccgcgatcatttcgggatatttcttattccgcataatccagacgtcgccgccgcaaccgttgtctccggtcagtaaccggctgtcaatcaccactccggcaccaaaccctgtacccagcgtaattccgagcaggttcttatataccttactgctgcctgcttctttcaggcgtttattcacttcgggcaaagtgcctgccaaagcttcgccataagcaaacaaattaccgtcattattaataaaaaccggaataccaaactgttccctcaaataaggtccaagtgccactcctcccctgaaggccgggaagttaggcaagtcaccaataattccatgctcatagtcagcaggcccggggaaagcaaaactgatagctaccggaagtttcggcaatcgtttctcaacttccaggaaaccttctacaagaacagacaagcaacgctccaagtcgtcggacgctgccggaaggcaaataggttccactatttcgcgacagccttgtatggctgaaaacacgaaattagtgcctcccgcatcgagcgtcattacgattcgttcatcatgttcatacatagttctcaagatattagatgatttatttcattattaaaagcgtacgtaagctttgatcgttacacattcttttcctgcagatttaccatacggggcaatggtatattctttcaccctggcaggaatgataaatgtttcggcataatgcaccacgaaaggttcaaaagcatgagtaggactctcaactacggcctcttctccctccaacagattcagtacatttacactatcgtttgtgtaatgcaacaccggtgatgagaaacggtggcgacgagtttcgataaattcgttcggatgcagtccggtacgttcttctacccaaccttctccggaagcgacttccgtaaactgattacgaaggtgttcatttacatattctgtatcgcgattccagttgattacgcatttaccacgttccacattgatcggacgcggttttccatccagtcccaagcgttgccagtcccatagtttgaaagtaaagaggttcggagtcgagctgatttcaagcaccatactgttggcaccggaacaatgaacggttcctcccgggatcagaaagtggtcgtgtttcttcgtcggaatcttatttacgtatttttctgcgtcaaacaccagttcacctttttgtgctttacgcaaatcgccgatcatcgcttctttgtccactcctgtcttcactcccagataaacgacggcatcttcttccgcgtctaccatgtagtaactctcatcctgcgtgtagtacataccgaagctgtcacggataaattgagtagtaggatgcacctgcaaactcaaattacctccgcccatcgtatccaaaaagtcgaaacgaatagggaagtcttttccaaagcgtgcctccaccggttcaccaagcaactctttacttttcagcaaaaccaaatcaaccgaaggcagttcaaagcgcactccgttcacttcaaaataaaggctgttctcttcaggtacacagtcaaagcaccagccgaaattttcgcgttcacgatccaggtcgcaaacctctttcatccattgaccaccccagggagccggatcgaagaaaggaactacccggaacggtgtgttcaccgttgcctctacccctttaaagaaagtatccttatcaatcatcttcggtgtcccggccacatgggtgtcaatccagaattctaccctatcaaacaatctttccttatacctatcacatactctccaatcgttgaaataccctctcttgtattgcaaagaaacagcatcgttccgattgtctatacctaaagcttttacctcatgccggcggaaacgttgttggatttcccaacgtgccatatccgcataaactaccatcgcatcctgtggagcaacaacagcagcacccgtacctatgattacaatggtttcttttgcttcactgatttgcttccgtgcagcagccaccttatccgcatccaaataatcttccagcttcaaattggtaacatagccgaataacacatcttcagtcatgaagcgttctgtcaacgcttgaatttctttttccggtttcatcaaatcacgtacattcatcactcttccggagaattcttttgaaaaagcatccagcacttcttcttcatatactcctgtatataaatccacagccagcacttttcttgcatccattttctcttttaacatagaaatgatagaatcccacccctgaacaagcatccccgtcagcttcgtagaaggaaatttatcataattagcttttctcatgtttatagcgtttttaaattttatatgttcatacatactttcaattgtgcaaatatatagattttatttttattccaaacaaaacttggattattttttgataaatcttatatttgctgaaaataaaccaatcaggatagatatgaaattagatcataatagtgataaaccgcttcatattcaggcagaagagatactaagaagactcatagaatctgaagagtacaaaaacgggaagctatttcccaacgaggtagaattgtctgaacaattacatatttcaaggaacacattgagacaagctatcaacaaactcgtgtttgaggggcttttggtgcgaaagaaaggttacggaacgaaggtagtaaagaaaggtatcgtaggcggagtaaagaactggcttagtttctcacaggagatgaagatgttaggtatcgagattcgcaatttcgagctgcatatcagtttaaagcgtccaaccgaagaaatcggcacattctttgatttaggttccaatcccggcactcgctgtgtagtgatggagcgtgtcagaggaaaaaaagaatatccgtttgtttacttcatctcttatttcaaccccaatattccactaaccggagaggaagattatacacgcccattatacgaaatgctggaaacccaatataatatagtggtaaaaaccagcaaggaggagatttcagccagacttgcaggggaatttattgcagagaaactggagataaaatccaatgaccctatattaataaggaaaagatttgtttatgatgtgaacggagtacctattgaatacaacgtcgggtattatcgggcagacagctttacttatacaatagaggcagagagatagaccgtatgttcatacatatataatataaggaggctattttagaagttgaaatttctatctttcctttaaaataacctctttatatcatctctctttccataattatgtcctacccgtcatttattatcgaacttaccattagagcatccggcaagaatccgatccagactttcatccacaacacctatcatctgaagtttggataataaatgatagtaggaagtttttcctactccttctattctcaacagacttttccaacctcttcccgatactatatccaacaaatctttcaccgttcgaacatcttgattatacaagatattagccaaccgggtatcagctactttacgaacaggcaattgaagtatccactcctcctgcccaacatttatattcttattattgtctaccaaggataaaaaacgagcatcgatagcacgctttcgataagtagccaatatatcttttttcagtttcaaccctttaagtatagagttatacatttgcaatgtcttcccataggtaattcgatgccgatcagccactttcgctactgattctcctgtagaaattgaatagaagatatcgcgggtaacagggtgaagaatcaatgctgacagttcacgaatgattatttcatatagcggtttacaagtcgtctgtgttctcaatacatatagtagatcatcgtatttggaaatgataaagtcccgttccagtttcttttcttctacgattttagaaaggtaacctgcttctaaaccaagtcttttgtgagcttccagataagcatccaaactctcatcatccaaaaacaactgatcgtcgattcgggaactcgtaatgtatccaagatttgcccaattctttagaatagcttcttgaatgtcgcgtctttcagacatctgttttgttgtgagccaatttgacataaaaaaacggaactagattaataatatcaactagttccgtaccttttattataaaagagtacggagctgccacaatcccgcaaacaggaggtagtagcggctacctttcagacacgggcagacagcccgtaccctatgagaagtcatagaagtacaggcgtctcccggtgtctgaaaaaaaaatccgctacgatttcctgttcaccgaggaaacgcacaatcgcataccacaaaggcatactacgttccaatgacaaaggtacaaatacttttcggaaaataacaagagagaggtataaatgtttaggaaagaaaacgaatgatgattgtataattaaaacgtatgtatataaaaagcagacaataagtttttcgtttcatatatagaataaaaggtgtgtcgttttgtttcgtatacaaaacaaaatatttgataaagctgctctaatctatttcataatatcattcaagtcaaaataaagcaaacgtgtagtagaatccacatcttcattatccaaaggaataaatccatctctctcataaaaagaaacagctgccgcatacacatctacagttaaaaagcgacaacctgttttattttcaagtacattacttacagctaacaaagcttcccgataaagaaaagattcgtattttattttttaaagattttcattgccagttcatagtctttcaacctttttccccgctgctccggcgtttcactacgcttctctttcatccgttcttcaaatcgccgagcatcttctccgaaaagtatcgaagtttccttaattggtcttgccatacctatacaactcctttcttttggtttatacgctactaaaacaattgaataaatcaggaagtgcaagttattacgaagttatcttttactcaccagctttattttgcatacgaaataaagtaaatagcctgtattattattttgtatatagaacaaaagacgtacctttgctcttgcaagcagaatataaaataaaaaaggataacaacagcaaactataaaagcatcgagaatcatgaaccaaaaaattgactttaacgacgtcccaaaaaattatttatactgcacctacaacaaatgtccgcgccgcaatgaatgcctacgccatcaagctacgctccgtataccgcaaaacgttcctgatttccgaacagtcaatcccaaccacataataggaaacgagaataactgcagttttttcaagccataccgtacttcacgctttgcctgcggaatagaccacatcttggacaacattccatattctacggctgtcatcatccgcaaagaattatattctttgatggggcgcagcatgttttaccgcatccgcaacaaagaacggatgctgcatcctgacgaacaaaagcagattgtcgctgtctttctaaaacatggtatcgaaaacaaacctgaattcgaccaatatattgatttattcgattggtaagacctttatcagaaacactataaaacggcgtttccggatattctgacaagggacaatactcacacctatgagaaaaaatactcataccaatgggaatatattctcataggtatgagtattttttctcataagggtaagtatcattgagaatcttatcatatctccgacgagagttgtcccgccgctttcaaataagccacataattcacatacaattggaaatgggcatccactttcgtctgataagcctgctgccaaagcacttgtgcttccagataatccgaaagagtttccagtcccacttcatattgcttaccactgactttcatattctcctctgcctgttccagcgaacgttcggaaagctccgtttccaaccgggcctcatccagattattggcagcttgcatcaactccagcaacatcttttcattgacattttcctgttcaagacgagcttgttccaacttcactttggcagactttactttattggtacgttcgccaaaatgaaacagagggacagagacattcaggaatacggaaaaagcaccctttttcatcaaagtttcatcattgacttccaatccgtgaagataatcataactacctctgacaccgatacgcggcaatagttcactacgattcagctttacttcctgctcggcaatggctatttgtttgttcaagattccatattcaggacgggcggtaatatcagaaacctgcactttccattcctgctccacttccggaaaatcatcagatatatcaatctgtgctgtcaaagggcggccgatgtaatgacagagattcatacccgcaagacggagggcgttatcagcctttcgcaaagaaagttcactctcgttgagcttcacctgcactttcagtacatcattttgcggtttcatgccatgccgatgagcactctttacatttttggaaagttccgtcagtaaggcgtgatatttttccgctacttttttcatctccttggctttcactaactgcacgtatgctttatctgtattcagaataacttccgaagtagttaaagcttcgttcaaatgtgccatttcctttcccaatagtgacattttataggcggcacggatttttcctcccatataaagaggttgctccacttgtacaccgcccgagtaaacagttccgaccttatagtccagattcagtccgggaaaataagcgaaaccgctcgataccagttctccggtagcaggattgggcaagaaaaccggaaggtttcctcccggaactccgagacttccgtccgctgtgctataaatacccgttccgttgactgtaaaattagggaagaaattggctttataactaagagacatcaatcgggctgcttccgtctgcttattagcggcagccatatccttattatatttcagtgccatttcacggcattgcgccagacttagtttttcttgcgcggcaagagaaaccgacaggccgaacaatacacccgctacactaatggctacaagaatttcttttttcatttgtctgtcttttttatatgaaagaataatgcatacaaaatcgggataaaaagcaacgttatcaacgtgccgaacagcaacccacccataatagaagccgccaacgaaccgaacatggcatccggcaacaatggaatcattcccaaaatcgtagtcagcgaagccatcatcacgggacggagacgactttgcgaactgtctatcaatgccgtcacaggttctactccctgattaatctgcaaagtgatctcatccatcaatacaataccattcttaataatcatgccgatcaatcccaatgtaccgacgatagccacaaagttgaatgtcttcccggtaagcagcattacagcaacaacaccgacaaataccagcggaatagtacagaagatgataaccggtttccggtaatctttgaacagcatgattagaatggatatcatcagaatgatagcaaacgggaaattcttgaacagatattgcatagactttgtgctggcgttcctctcgccttgccattgaagccgatatccgtcaggcagcggaatctgttcaatctgcgtggcaatggattgccgcgccttctccgtttctacccccggaacaggagaacattgcacccgttggctacgctgcccgttataacggggaaccaccggatcttcccacttcacatcaatccgcttactgatttgttttaacggagttgttcccatcaacgtttccaccagttcttcttttgatagtgttcctgtcttcagtttcatcatcatttcctgtgtcagcaaaccgttcagagaaggaagagacgagaatatctgcgtattgcccaggttttcaatcggatttccgtgttcgtccagacaacgcaagtagatattatctttgtgaataccttcgtagaaagacccgatagggatgccgctggtagcggtcagtagagataggcttacatcattacggctcaatccgatagcacgtgccgcaggctggtcatattcaatagtcagtaccggaatttgcggttcccagtccgtggtaatcaggtaaacatccgggcaattctccataatcttgcgggcactgtctgccaactgatgcaaaacagcaggatcaggaccggtaaattgcacttcaataggatatttcttgaacatcagattgtagcggttcatctttacgtaagcatccggataatgttgtgaaagatattgttgaatttccgccatgttatccaccaaatcgtccggagaggtgaagtcgataatcagttcaccgtaagataaggaaggattggctacgttacgcaccaagttataacgagcaggtgtaccaccgatagaagtagtgacgtgtgtaacttccggacgctttttcaggtaaacttcgatttcttccaagtcacgtgctacacgagtggagttagtcccttccggcaatttatattccatgtaaagctgatcgtagaccatatccgggaaaaagccctgcttcataaaccgataactgaaagccgaaagcaataccaaagcaatcattgtaaacacaaaactccaacgatgtgccagactgaatttcaataatgaacggagcacagcataaatctttccttcatacacacgttttccggcagcagtagttgccgcagagatttccggatgcaaaatccggtcagccatcaacgggacgtgcaccaaagccagcacccaactaagcaataaggaaacagcgagtacgataaacaaatcgcgcgtataaacgcctgccgtatcaggagacataaagataggaagaaaagcgatgatggcaatcagagtagctcccagcaaaggcatcgctgtctgccgtccgatggcagtcattgcctccatccgactctttccggctttcaaatctaccaaaataccgtcgatgataacaatcgcattatccaccagcatccccatcgcaagcacgaacgaggccaatgaaacacgctgcatcgtaccgttcataaaataaaggaacagaaaggaaccgaataccgtcactaccaaactgataccgataatcaccccgctcttaaatcccatagcaatcatcagaataacaactacgataatcacagattctatcagattaagaatgaacgtccccaacgaactgcctacacgttccggctgatagaaaactttatggcactctacccccgctggaaggcgttcgactttcagttgctccaatttcttttccacttgatgccccactttgataatgtcggcatccgaagaagcggccaccattattcctatcgcacgctgacggtcataaaacaattcgttgcgggtaggatcttcataatctttctcaatacgggctatatcactcaaccgcaactgatcggcatcatgtccctgaatcagcatacgaccgatatcctccaccgtcttaaacttgtcactgactgtcacccggatacgattatcgccattatcatagtaaccagtataagtcgtttggttctgtccgttcaatgtggctagcacttcggcgggtttcacacccaagttagccatccggtcttgcaaaagagagatattaatacattcgggacgtttaccgtataagtcgacgcgttccaccccatccagttcgctgacttcacgtttcaccagttctgaataatcagacagttccctgtcggaaagtccgtcacccgtcaaagcgaaaaacattccgtaaacatttccaaaatcatcttttacaatagaaggactggcaccttcgggaagttctgcctgtgcgttcgccactttacgacgcaacagatcccagcattgttctacgtccgtctctttgacagtcgttttcagttctacctgaatcagggagagatcgttgtaggaataactttccacattatctatattccccatggagcgaatattcttctccagtacatccgtcacctctaattctacctgatgcgcagacgcaccgggataggtggtgactaccatggcaagctttaccgttatttctgggtcttccagtttactcatttcataactggaataagctcctcctacaatcagtacggcaatcaggaagtagattaacttcttgttctcaaatgcccatttactaatatcaatcatagcagtcctcccacattggtttcagcagccggaagaagcggttccacctgttctccctcttttacatgatgcacccccgaagcgacaaccaaatcaccgggattcgctccgtctgaagtaatcaggcatctgccgtcgctaagcagacgggttactgtcacatcacaacggcgaatagcgtgactggaagcatcataaagaaagatactcgtacgcccgttctcacgaagaatcgctccaccgggaaccgacaggttacgcacatctccttcactacattcgatagttaccattgtattcatgccgggcgatggaactgcctgtttatcttcttttttcagttgaagccgcatggtgtacaactgattggcatttgccttaggggtgacactaatcagttccaaagcatatctttgatgaggataaatatcgaatgtacaatagtagcgggtaaactgctgtcgacgaatatattccactgccggaagattaatctccacctccgggcttccctcactgatgatggaaacgacgggcataccggcagctaccgtctcatgggaatcaaaaagacgtttctgcacatatccgctaaaaggagcatacaaacgggtgtatgccaactggtctttagcatggttatatttggcggtaatctgtctcaatccgtacacggccttatcgttagcatccggtgttgtcacattttccttataaagtgccatcacccgttccgcctccgctttcacactttgatattctgcttctgccgcatccagctgaatctgatagtctgtcggatctaattctgccagtaattgccctttacgcacataggcaccgtcatttacatgcatatactgaatagtaccgctcacccggaaagacagacttatgtcctgtgccgctttcacccgtcccggaaactgcaaagctatttgtctgtcggcagaaagtacggtatcaatcttcactgccggcttactgtctgtgttttgtacacgttgcccacacgaagtcaacagaactgctaaaaatcctgttaataagaagtctaatcgtctcatattttcacttattagttagttgccacaaaagtatcccaagcaaacatgaggagaaaggttgatttagacgaaacattgttctatttgtacgttacctaagataaaaagccgaaatagtttgctatttgtatttatttgtttattactttgtaaagaaattcatttcaacgaaaaggaatatggaaccactgatgccattcaagtatgttataatatctccggaagatacttccatgaaagaaggatgcattatttccgaattcaaccaatgcggacttttcctctgccagaaaggacaggcggaaatcctgttgggaggtagaccatatcagattaacaaaaggaatcttttcatatatacagcagccaaccttctacagatacgccaaagaagcgcagacttggaaggaatcatgatagaggtcgacctggattatgtcataccaatagtaaacaaagtagctaactcggaaaatttgctttatttgcgggaaaatccctgcctgtcgctctctgaagagcaatatacatttgtagagaacttgctcaaatctgtagaaaaacgaattaacagggagaatatctgtaacagttcccgtcagaaacaacatttaatttctgaattaatcaaatcctggggacaggtgatatgctatgagttattaaacatttatttcagtaacgaaccccaaacaccactgccacaggataaaaaggataagatcttccaaaatttcatgattaccctttatcgatattatcgtcaggaacgtgatgttactttttatgcagacaagcaatgcttgtccgcccgatatttttcttctgtcatcaaggagaaatcagggagcagtgctttgcagtggattatacagaatgtcattacagaagctaaatatctgctcgataataccgatttaagtattaaggaaataacaaccaaactcaacttccccacacaatcattcttcgggaaatatttcaagcagtatgtcggtatatctcctaaagaatatcggaacaaacttatcaaacagtaactttcttaaactgccggaactgccaccacaacattcctccggatataagactagccgccaaatctgccacaggcatactggcccaaacgcccatttgtccataatagtgaggtagaatcaataaacagggaacgagaaataacatctgccgcgtcagcgacaagaaaatggctttacttgccattccaatactctggaagaagttggaagctaccatctgaaacccaacaatcgggtagaaaaataccacaatacgaaaacctttagaagcaatgctgattaactcttcgtccgaagtaaagatggaagatacgatttccggaataaacataccgatcagaaaaccaatcgttgtcactacagttgcacaacaaatggttactttcagtacttccgtcacacgaggatagagcttcgcaccaaaattatatcccgcaatgggctgcatcccttggtttagtcccaatacaatcataataaagacaaaaacaatacgattaacaataccgaatgcaccgatcgccaaatcacctccatgctcttttaatccctgattaatcagaatcacaataaagcaagacgccatattcatcagaaagggagacataccaatagccagcgaatccaacacgattttccgtttcaaacgaaaaatcccctttttcaaccgtatcagttcatctttgcggcagaacagatgaagctgccagaccaatgcaatcaactgcgcacaaaccgtagccgtagccgccccacggattccccagtcgaatacaaaaataaacaatggagcaagcaatacattgattatcactgtcgttattgttgccatcatcgctttctgcggatggcccgaagcacggagcactgcattcagccccagatataaatgggtaaccacatttccgagcaagataacctgcataaattcacgggcatacttcaccgtttcatcgcttcctccgaaaaagtaaagtatcggatcgagaaaaggaagaacgattaccgtaaaagagatacctataataaggtttaatacaaacacatttcccaaaacctgctgtgcggtatcataatctttctgtcccagcttcaccgaaatcaatgtagccgcaccgacaccgaccaacgagccgaaagccgcggcaagattcattagcgggaaagttaatgccaacccggaaatagccatcgcacctaccccgtgaccgataaaaatactatctaccatattgtaaagagaagacgccgtcatggcgataattgccggaatggcatactgcattaaaagcttcccaatcttttccgtacccaacgcagtgggtgtcttttgtcctgtcatacctattagtttgagacggcaaagatacaaaaaagaggtggattacaggatatatgagaaaagtttcgtatttttgcctccaaaattgagttaatacgtaacgaaatgaatatattagaactaagtgaacaggaaatcattcgacgcaacagcctgaatgagcttcgtgcgatgggtattgatccataccctgcagcagagtatgtaaccaatgctttctctacagatattaaagctgaatttaaagacgacgaggagccacgccaagtttccgtagccggccgtatcatgagccgccgcgtgatgggtaaagcatctttcgttgaattgcaagactctaaaggtcgcatccaggtgtacatcacccgcgatgatatctgcccgggagaagacaaggaactgtacaactctgtattcaaacgcctgctcgacttaggtgactttatcggtatcgaaggtttcgtgttccgcacacaaatgggtgaaatcagtatccatgctaagaaactgactgtacttgcaaagtctatcaaaccgttgcctatcgttaaatacaaagacggggtagcttatgactcttttgaagatcccgaactccgttatcgccaacgctatgtggacctggtagtgaacgacggtatcaaagaaacattcctgaaacgtgccactgttgtgaaaacattgcgcaatgctttggacgaagccggttacacggaagtggaaactcccatcctgcaatctattgccggtggagcaagcgcacgaccgttcatcactcaccataactcactggacatggatctttacctgcgtatcgcaacagaactttatctgaagcgactgatcgtaggtggttttgaaggtgtatatgaaataggtaagaacttccgtaacgagggtatggacaaaacccataacccggagttcacttgtatggaactctacgtacaatataaggattacaactggatgatgaatttcaccgaaaagttgttggaacgtatttgtatcgcagtaaacggtagcacagaaacagtggttgacggaaaaaccatcaacttcaaagctccttaccgccgtctgcctattctggacgctatcaaagaaaagacaggatatgacctgaacggcaagagcgaagaggaaatccgccaagtctgcaaagaactgaagatggaagaaatcgacgagacgatgggtaaaggcaagctgattgatgaaattttcggagaattctgcgaaggtacatatatccagccgactttcatcaccgattatccggttgaaatgtctccgctgaccaagatgcaccgctctaaaccgggactgaccgaacgtttcgaactgatggtgaacggtaaagagctggctaatgcctactcggaattgaacgatccgctggatcaggaagaacgtttcaaagaacaaatgcgtttggccgacaagggagacgacgaagcgatgattatcgatcaggacttcctgcgcgctttacaatacggtatgcctcctacatcgggtatcggtatcggtatcgaccgtctggtgatgttaatgaccggacagactaccattcaggaagtattgttcttcccgcaaatgcgcccggaaaaagtagtgaaaaaagacgctgctgccaaatacatggaattgggaatcgcagaagactgggttccggtgattcaaaaagccggttacaacacagttgccgacatgaaagatgtcaatccgcagaagctgcaccaggacatctgcggcattaacaagaaatataaattagaactgaccaatccgtcggtaaacgacgtaactgagtggatacagaaaatttaataagttcttcatccaaatccatacaaatgaaattacccggcaagatagcgataatgggcggaggaagttgggctacagccatcgcaaagatgtgtctggcccaagaggactctatcaattggtacatgcggcgagacgaccgcattgccgattttaaacgattagggcacaatccggcttatctgacaggagtgaaatttgatacgagacgcatcactttcagttccaacatcaacgatgttgtgaaagaatcggatacactgatcttcgtcactccctctccttatctgaaggcgcatctgaaaaagttgaaaaccaagataaaagataagtttatcatcaccgctatcaaaggaatcgtacccgatgacaacgttattgtatcggaatacttcacaaaagaatatggtgtgccaccagaaaacatagcagtccttgcaggtccctgccacgcagaagaagtagctttggagcgactctcctacctgactatcgcctgccctgataaagacaaggcacgtatcttcgcacgccgtctgggaagcagttttatcaaaacatctgtcagtgatgacgtggcgggtatcgaatacagttcggtgctcaaaaacgtgtatgccattgctgccggtatctgtagcggactgaaatatggcgacaacttccaggctgtattgatttctaacgccattcaggaaatgaatcgtttcctgaacacggtgcatccgttgaacagaaacgtggatgaatctgtttatctgggggatttattggtgaccggctactccaactttagtcgtaaccggactttcggaacgatgataggtaaagggtattccgtgaagagtgcgcaaattgaaatggaaatgattgcagagggttactatggtacgaaatgtatcaaagaaatcaataagcatcatcatgtcaatatgccgatactggacgctgtgtataacatcctatacgaacgtatctcaccaatgatcgagattaaattgctgactgactcttttagataatctttaaacaagaacgatatgattagtttaaacattgaaaagacatttggatttatctccaaagaaaaggtttttgcttacgaagctgaagtaaaagccgcacaggaaatgcttgaaaaaggtacaggcaaaggtaatgactttttaggatggttgcatttgccttcttctatcactaaagaacacttagccgacctgaacgctacagcaaaagtattaagagataactgtgaagtagtaatcgttgccggtatcggtggcagctatctgggtgcccgtgccgtaatcgaagctttgtctaacagcttcacttggctgcaggaaaagaaaacggctcctgtcatgatctatgcaggacacaatatcagcgaagattatctgtacgaactgactgaatatctgaaagataagaaattcggtgtcatcaatatttctaaatcaggaactactaccgaaactgctcttgctttccgtttgctgaaaaagcaatgtgaagatcagcgcggtaaagaaactgcaaagaaagtaatcgttgctgtgacggacgctaaaaaaggtgctgcccgtgttacagctgacaaagaaggatataaaacatttatcatccctgacaacgtaggcggacgtttctctgtactgactccggttggtttgctgcctatcgcagtagccggatttgatatcgacaaactggttgccggtgctgccgatatggaaaaagtatgcggatcggacgttgcatttactgaaaacccggctgctatttatgctgctacccgcaatgagttgtacaggaatggcaagaagatcgaaatcctcgttaacttctgcccgaaactgcactatgtaagcgaatggtggaaacagctttacggagaatcggaaggaaaagacaataagggtatcttccctgcatcggtagatttctctacagaccttcattctatgggtcaatggattcaggaaggcgaacgttctatcttcgaaactgtgatttcagtagagaaagttaaccacaaactggaagttccttctgacgaagcaaatctggacggcttgaacttcttagccggcaagcgtgtggacgaagtgaacaagatggccgaactgggaacgcagctggctcacgtagacggtggcgtacctaatatgcgcatcgtacttccggaattgagcgaatacaacattggtggtctgctctatttcttcgaaaaggcttgtggtatcagcggttatttgctgggcgtgaacccattcaaccaaccgggtgtggaagcatacaaaaagaatatgtttgccttgctggacaaaccgggttatgaagaggaatccaaagcaatccgtgcaaaactataaatcaagaacgttttataaacggtaaactataaacaatgaacggtgaacaactatgctatatacatggatttgttcaccgttcattattatattcaattgattgcagtttccgattgtaccgcttattacccgttgtaccgtttactgctcaccacttctacttctcatcttccactttcgtcttcaaaccgatttcttcctgtgctccttcacattcggctttggaagaaagatagaactctaatttcacatcaccgttcttatctacctgtttaatggtcgcaatcaccataattttggcttttgacaccccatccttaaaacgaagctgtcctttttccacatctgtcagatttccctctgtagatacttctgtttgctcataaaagagtttggtatccacttcatcgtcattctgaagtttaaaggttttcagttctgccccatttccatccaaaagcagaaaggctttcacttcatctcccactttcaaggcgggcagttcctccctctgattcgcatagtctttttcatcggaactggtattttcaccgtccgattcgtaagcgtctccgcgattctatatagtgtattaaaataaaaaggctaatgatccctttttagtcattagccttttcccatctgtcaggaagcagttccctgtatttctcaattggtgtgttcggttgccattcggctgttctgtttatcacatccgtgagatactcaaatagattcactttatgcatcctacaagtgagtgctatcgtgtagagtatggcgcctcgttcggcccccttatggctgccgaagaacaatgagttttttcttgataaggatatgtaccggttcatccgttcaaccatattgttgtccagataagtgtcaccataattaaagatgtccaccactgcattccactcattgcgaagataggtaatggcttcctgcagttcgctcttaggtaataaatccccccgttcttctatttcatcaagcacatcttttatttctccgagtatgtccggcgcatacttttttcgatgcataagattctgttctaccgtccatccctcagccccaactttatgcttatgctcgttttgataaagtgcgtttatcagctccacgatcctttttgcatccgggtccttctcaccgcaatctataaatttccgttttatatgttgcaagcacgggatgcgtgtgatattgggataagcatcgctttcgagcttccggtaaggtgagtaaccatcgctttgtatgatacctttgcaactgcctaattcgttaagaataactctttcagaccgggagccgtcatcatagagcaagtatatcatcctggtgtttatgccgacaaccacccaaaggtatcccttcctgactccttttcccttgctgttcttttccgggacgagtattttgtaataggtttcatcggctgccttataaggatcactcaaagctgtctgccggatgcacttataaagattttcgaagaggtttgaggctttctctatcaacttatgagccgtaggtttcttcagcgtaaagccatgactctcgaagtagttgatgattctttcaacaggtagcgattgtatataacgtaattccatcaatccggcaataaatgaaccgtcatagctggaattcaagaaggccgaagccggtgtttttccctcaaacaggcgaccttcttgcgtataggtgtgtatcttgtagacatgcttgatgaagcgcatgggtacacattcatagcggacgcatattctgggaacagtggtaaacaaccgggccttattgatgtcaaaatcgggatcatcgggataaacgacatgttcttcttcctccatctcataatgcatgtcacgtttggccccattattctttcttgctttacgcttatctgctttttccgcttctatcttctgccgctcttcttcggatatggcagattggggagcctgttgctgttcggatgtgttggatacaagtttggcgagtcccttagtaaggcgctgttgcttgctaagagattcgcctttttgaaggagtgcctctttaagggaagaaacctcctttatcaaagcatctatttggtccaagagtctgttgttgtcatctcgtaatcccttgatttgttccttcaataactctatgatctcatcctttttcatggcataaagatataaaaaatcaacgaattggccaaataaaccggatgatatctttagcacaaataactaataatcagaatgttgaattagatcctgaaacgctttctcaaccgtacagactttaatgacactccatttaagataaaagacaaaacctgataagaaatctcgtaattgcctgtattggggttaaatgtcggtaactcaaaacttccaccttcgaggcgcttgtagtacagaagaaagccatcgccatcccaacgcagtatttttacactttgtcggtttttaccaaagaataaaaagatatctccggaaacgggagacaagtccttcatttccgatcgtataattttgaataaaccgtcaatgccaaggttcatacgaacaaagccctggtacagatagtagcgattggctgatgttagagaatacatggatctccctcctttctttcgtaatcgcgcaacattttaataacaccaccgggtgtggcccgtttgaccgaaatggtggttccactgttaaaggtgattgtgatcccggcaagactaaactcttcttccgacaacatggcgggtgctatttgagtgaatgaaggagaggaagttgtcggttgggagggttcaacgccgccataataatcacggaccacatctgccttggcttgtttaacgctatagccccgtctggacatccaggaactcataccaccaaaagtggtatgctgatcgcggcaaacatcggctaaagaacaattgtagtctactttcaatacttcaaggaaatgtttccaagtttttccaaatcgattttctgctaaatccataatgcttcatttttatacatcgcaaaaatataagaatgaaaaaagggcgacaagatagaatcgcggagacgcttactccgattcgatcttcgcataaagcttttctatcttgataacaggactttccccactatcagagcaggcgcctaaaaacaatggtagcaacaataatactctctttttcatgctatcgtcgagtttataacgttacaaaaatacacatattcttctaaacagcaaataattatgtagttaatcgcttgggagcgtcatttgcaactatcttccctttctaacttatctctcattttttatcgttatctttgcctcgtatacagttgtagatgaagcgaatcaaacttaaaaaacaaatagaatggcaggaaatttattaaagaagtccagtggactcatgctactatgtagcgtatcattgctaatgatagtcatgaccggttgtcaggaagccaaactcaaaactgtaatcgggatagccaacaaacagtgtccgctggacatgggagaagtcggcaatattaccagtatcatctacgacggggataacgtagtgtacactctcaacatgaacgaggaaattaccaatattaagattttgaaagataatccggaaagcatgaaatcatctatcaaaatgatgtttcagaatccggctgctgatgtaaaggaaatgctgaaattgatggctaagtgtaattccggattacacatgatatttgtagggaataagtcgggcgaacaagcggtttgcgaacttactgccgaagaattgaaagaggttatcaatacaaatgccgacccggcacaaagcggacagacaaagcttgaagcgcaactgaaaatggcgaatctgcaatttccaatgcaggccagtgaagaagtcgttgtcgaaaaaatcgaaatcataggtgaatcggttgtttatatatgcagtgtggacgaagagttgtgtcctatcagccagattgaagaaaacgcagctgaagtgaaagagggtattgtgtcaacgctagcaagtcagaccgatcctgccacccagatattcataaaaacctgcgtggagaacaataaaaatattacctacagatatatcggcaaggattccgggaaacaatacgatgtagttattcccgtgtctgatctgaagaaaatgctcataaaaaataaaatatcatcttaaaaagattccgcaacgtacaaagtatgaaaaagaaactgaaagccgtcctgtttgacatggacggcgtactctttgactctatgccttatcattcggaagcctggcataaagtaatgaaatctcatgggctcactcttagtcgcgaagaagcatatatgcatgaaggacggacaggagcctctacaatcaatattgtttttcaacgtgaattgggtagagaagccacacaggaggagatagaaagtatctatcaggagaaaagtgttttgttcaattcatatcccgaagcaaagcctatgcccggtgcatgggagttactgcaaaaagtgaagaaggacgggctgattccgatggtggtcaccggctccggtcagttatccctgctcgaacggctggaacaccactatccgggaatgtttcacaaagaactgatggttacagcgttcgatgtaaaatatggcaaacccaatcccgagccgtatttgatggctttgaaaaaaggagggatcaaagcggatgaagcggttgtagtagaaaacgctccgttaggagtggaagccggacacaacgcgggtattttcaccatagcagtcaatacgggtcctttgaacgggcaagtgttgctggatgccggggctgatttattatttccatccatgcaggcacttaatgacacctgggacatgatgactgaaaatgacatctaaaagctgaaaagaaaatttattcttcaaaacagaagaaaaatattgaaaagcaggaatataaatagtatttttacgggagtttaattcgcttagattctatctaagccaacgcagattctactatgcaaaagttattatctttaccacccaatttgatccattgcttccacgaactggaagaagttaaccataccgattggttttgtacatcagaccccatagggagcaaactaggctccggcggcggaaccacatggttattgcaagcttgccatcaggcattcgctccacaagagtctttcagcaactggataggacacgaaaaaaaaatattgctccatgcaggcggacaaagccgtcggctacccagctacggcccttccggcaaaatattaactcctatcccgatcttcagttgggaaagaggacaaaagctgggacagaatctgttatcattgcagctcccgctctatgaaaggattatgaatcaggctccggccggtctgaatacgctgattgctagcggagacgtatatatccgttcggaaaaaccgcttcaggatattccgaacgcagatgtagtatgctacgggctgtgggtgaatccttcattggcaactcatcatggcgtgtttgtttccgaccggaaaaaaccggaggtgctcgatttcatgttgcagaaaccttctttggaagagttggaaggattgtcgaaaactcatcttttcctgatggatatcggcatctggattttgagtgaccgcgccatagaagtattgatgaaacggtcattgaaagaaggtacgaaggatattacttattatgacttatactcggactatggtttggctttgggagagcatcctaaaacgaaagatgaagaaatcaatcagttatccgtagctatattgccgttgccaggtggagaattctaccattacggcacaagtcacgaactgatttcttctactttagccatacaggacaaggtacgggaccaaagaagaatcatgcaccggaaagtaaagccaaatccggctatctttatacagaattccatcacacaagtttctctttctgccgacaacgccaatttatggattgagaatagccatgtgggaaaagaatggaaattaggttcccgccagattattacaggagttcctgaaaaccagtggagcatcaatttgccggatggggtttgcatcgacattattcctatcggtgagaatgagtttgttgcgcgtccgtatggattggatgatgtattcaaaggagcgttggacaaaataacgactacttaccttaatgttccttttacccgttggatggaagatagaggaattacctgggaggatataaaagggcgtacagatgatttacaatcggcatccatcttccccaaagtggcttctgtggaagatttaggcatattagtacgctggatgacctcggagccacaactggaagaagggaaaaaactttggttgaaagcagaaaaagtttctgcagacgaaatatccgcaaacgccaacctcaagcgtctttacgaacagcgcaatgctttccgcaaggagaactggaaaggattggcggccaattatgagaagagcgtattctatcaactcgatttgctggatgccgcaaatgaatttgtacgtttcaatctgggcatgcctgacgtcttgaaagaagatgctgcccccatgttacggatacacaaccggatgcttcgtgcacgtatcatgaaactacatgaagacaaggattgtgccaaagaggaacaggcagcctttcaactgcttcgcgacggtttattgggggtaatgagcgaacgaaagagccatcccatactcaacgtttattccgatcaaatcgtatggggacgcagtcctgtgcgtattgatgtggccggagggtggacggacacacctccctactctctttattcagggggaagtgttgtaaatcttgctatcgaactaaacggtcaaccaccgctacaagtatatgtgaaaccatgcaaggaatatcacatcactcttcgctctatcgacatgggtgcaatggaagtgataaggaattacgaggaactgcaagattataaaaaggtaggttctccattctctattccgaaagccgcccttacattggcgggctttgcaccggcattctctacggaatcttatccttctttagctaaacagctggaagatttcggttcaggaatcgaaattactctgctggctgctattcctgcgggctctggcttgggaaccagttccatactggcatctaccgtgctcggagcaatcaatgatttctgcggattggcttgggataaaaatgatatatgtagttacacattagtattagaacagctcctgaccactggaggaggttggcaagatcaatatggcggtgtcttttccggtattaagttgcttcaatccgaagctggtttcgaacagaatccattagtacgctggttacccgatcagttctttgttcatcctgattaccgcgactgtcatctgttatattatacgggaattactcgtactgctaaaagtattttggcagagatcgtcagttccatgttcctcaattccggtccgcatctaagcttgctggccgaaatgaaagctcatgcaatggatatgagtgaagccattttacgaagtaatttcgagagtttcggtcgtttggtcggcaaaacctggatacagaaccaggcattagactgcggaaccaatccaccggcagtagcagccattatcgaaaaaatcaaggattacaccctgggatacaaactccccggtgcaggtggcggaggctatttatatatggtagccaaagacccgcaagcagccggacaaatccgacggatactgacggaacaagcccccaatcctcgtgctcgttttgtagaaatgactctttctgataagggacttcaggtttcaagaagctaaagagaaagcgttaccatattgccggtcaatcatccggaaccataaaaaacaagcttggacagattcaaacgaaatgtccaagctttaatttttcaacgccataatgatctgttttacatgttgagacttgaaataactgtaaagtaaatcataataatgataaaagcaatagctccgataatcagcgcaacactaccccatttcttttttctagcttcttccattcttatttatatttattgggattaatataatttatcgtcaaatgtctacatctggaaagctatgaacatactactacagaatatcattccttactttttcatatctacaaagttagcatttctcacgagaatccttttatttaaatcaactttttcattctatttaggctaaattatgcaactacatacaataataactaactaggtttgagaaaatgcaaagcaaaatacatgactgactatctaaggattatgaatgtaaatatcaagaatatgaaacacatttattttactcattaccgcttttatatcacacaaaaactgtacatttgcactataaataatatactagactaaaaaaaggatcaaaaacaaataaaatataaagatgaaattacttaaactattattcttatccgccatcttgctatccgcatgcaacaatgactcgacagacactccggaaacaggagagcccaaacagattatcgtagaaatggcctccaatgattttacagatgtctccggcacatatactcttgagaacaataaagaatactgtactcgggaagacggaaaatataagatattattggtcaagagtacatatataaataaggagggaaaggaaaaggatattcttacctatggcattctggatgtagcaaataaaaaatacatctgctatacagccaacatagatgtagcccaaagacttgaaagagactgggaattttataatcaaataactaatccggattttccagatgacccaaatagacgattagtttgtaattcttatacaaagaaagactaataatagaacctcttacgagataaaagaaagatttcactttgatagtcaacatataacattggtttcttgggaacaacaatagaccaacaaaaatcaattacaagggctaaatcctgcatttagttttagttatccaaggtataagaaaacagaaatccctcaataatcaactgattatcaagggatttttctgtgaccccggtgcgattcaaacgcacgaccttcagaaccggaatctgacgctctattcactaagctacggggccattctttctaaatgcgaggacaaaagtataaaaaatcttctcatcttcctaatgattctcctttttttatagttcttaaggtacttccctatattagaagactgttattttgaaatgctttagagcatttactttatcaaattgacaatcttttagagaatatccattacatatatcaattttattcctatctttgccgacaattaacatttaacaaacctatgagttacttgataaaacctaagaactataagccgctactcgacctcaaacagaccgagctgggaatcaagcaaataaaagagttcttccaattaaacttgtcatccgaactacgccttagacgtgtgactgcccctcttttcgtattgaaaggaatgggtatcaatgatgatttgaatggaatagaacgacctgtttctttcccaatcaaagatctgggcgatgcgcaagccgaagtggttcattcattggctaaatggaaaaggttgaccttagctgactatcacatcgaaccgggatatggtatttatacggatatgaatgctattcggtcagacgaagaactgggcaatctgcattctctctacgtagaccagtgggactgggaacgtgttatcaccaatgaagaccggactgtgaacttcctaaaggaaatcgtcaaccgtatttatgcggctatgatccgtacagaatatatggtatatgaaatgtatccgcaaatcaaaccttgcctgccacaaaagctacatttcattcattcagaggaattgcgccagctttatccgaacctggaacctaaatgtcgcgaacatgccatctgtcagaaatatggagctgtgtttatcataggaataggctgtcaacttggtgatggcaagaagcacgacggacgtgcaccggactatgacgactacactaccaaaggactgaacgacctgcccggactaaacggcgacctcctattgtgggacaatgtactgcaacgctccatcgaattatcatcgatgggaatccgtgtagacaaagaagccttgcaacgtcagttaaaagaagaaaaagaagaaaaaagactggaactttatttccacaagcgattgatgaatgacacccttcccctgtctatcggaggaggtatcggacaatcccgcttgtgtatgttctaccttcgcaaagctcacatcggagaaatacaagccagcatctggcccgaagatatgcgcaaggaatgtgaagaacttgaaatacaccttatataacaaactatgaatgtacaaattgaagaaagctggaaagcacatttagaacccgaattcgaaaaagactactttcgcacactgaccgatttcgtcaaaagcgaatatagccagtatcagatcttccctccgggaaaactgatcttcaatgctttcaacctttgtcctttcgacaaagtgaaagttgtaattataggacaagatccttaccatggaccgggacaagcgcatggtctctgtttctctgtaaacgacggagtgccttttcccccttcattagtgaatatattcaaagaaatcaaagccgacatcggcacagatgcccctgctacgggaaatctgactcgctgggcagaacagggagtattgttgctcaacgctacgctgaccgtacgtgctcaccaagctggttcacaccagaaccgtggctgggaaacatttactgatgctgcaatccgtgccctggcagaagaaaaagaaaacctggtatttatcctgtggggatcatacgctcaaaagaaaggagcgtttatcgaccgcaacaaacacttggtactcacttccgcccatccctctcctctttctgcttacaacggcttcttcggaaacaaacatttcagccgtacaaacgactacctgaaaacccatggaaaaacagaaatcgcatggtagttggagaagttgagaatggagagttgagagttaagaataaagagtaaagagtaaaaaaaatggctgcactattcgtcgaatgatagcgcagccatttttcttttctatattgtagcaaaacaattacacgtccgaatttccactctcaactctccactctcaacttatcctagtaccactgaatgttactttgcgtttggcttctctgctcatacttcaagtcttgcaggatgcttgcattcgcacggatggtaacattgtaatatttccagcgtccgaaaggagaaagactggcggacaggttgaaacagtgcaagtcacgggagattgtacaagaagtctgcgtaatctcttttgcctgaaaatcatagcccgagttgaacgagagcgaccagttattagaaatctttatatttccgtttgcattgatgttatgcgtatacgtataaggatatcgcatggaataacggttaataggcttagacctatcttcacggatattaaacgaatagctaaggcttaacgaccaaggcatcttaaacacctgataaccatccgggtctgcctgtgctttctctactttcttaggtgtagtaccatctccttccgttccgtcagattcttcatcgtcactatcctccgacttcttatcttttcctttttcatcctcctctttcggaccgaaccatttcttccatgtgtcattattaaaggtatagttgaaagaagaaccatatccttggaaacgcccaaaacgaccatacgaccattctgtacggttactggtcactacattaccgcttttatcgaatgtataagcatacgtagcgaattgggcattcatattgaaagtataattcttggtcagtttcagacggaggttcatacttaagtcactccacggtctttcctttgccgccatattataggacatattggcactcaaatcatcaataaggctaactttcttgactgtatcattctttgcgtcataatacttcatctccaagttattagctatcgagaaactaaccgttcccgacccctcacgagaaggcacgccataaggctgattggtaaaaggagaataatattgtgtattaccattataatcggtatattcttcccagtacttgccaaatcccggagcaccactcaaactcacctgcggtgtgaatacgtgacgaatctgtatctccttcttcttcgcaaagatcggtttatacataccatacaatttcgtacttagagccaaactagccgagtaattggatacacgataaaagccgttaagagaatcgcccggcaatgattccagcctgtgagtatcttcgttataatgctgattgattttacgggtgtaccatcgttctgtataattcacagaaggattgacctgcaaatatttgaacagcgtaaaagtagcactgataggaatgttatggttcatcgcattctcccatgagcttagtccggctttgaacaaatggtcatctttagtacggatactgtttgtcagacgtcccgtataaccaatggaaatcttctcgtaccaacgttcggctcctgccgctttcttgcgcttgaacggaaacagacggctcaacgtaatattcaagtcaggcaaagtgaccgcaatagaagagtcacgcattgtctgtgcgatattggtagttccggataaggtcagaccgatatcgggaaaactacgagaataactaatacttgatgttttggtattttgagtcaacaactgcgaattataaaggttgttgatattagaacgttcataactactggtcgagaagttcacactggcagagaatgtagtgttcggactggctttagcatcctgtcgatggttccataccaccttaaagtccttagcaactgtatagtccggcatccctttatctccagtcttggtgacctgatagtccgcttgcagcgtaccggaatatttatagcgtttattatagtttgtcaatccagacaatctccatgaacctttcgtgaagatatctcccgttattttcaagtccatgatatcactcatggcaaagtaatatcctccttctgccaaaccgaaaccacgactggagtcatccatataagtcggcataatgaaaccggaagagtaactgctggagaatgggaagaagaagaacggcacagccaacggcagaggcacatcttccacaaccagataggcaggtcctgtcactacattctttttagggcgcaccttagctctcgtcagctgcatatagaagtggggatgatcgtgatgatcgcaggttgtataacgcccatgctccatgaaaatttcatcattggcccctttcttcgccttgcttccggtcacatatccttctccctgctgggtgacgatatcagtaattcccgctttcttggttttgaagttatatcggattgtttccgtatcatacgaggtatcaccttctttaaataccggtttacctttttccactccggtagtatccttgataccataagcatgcacagtactactatccagattcatcgaaataacttccgcagccagttcgatgttctgataattcacttttccgctaccataaagtgtagcggctcctcccaaagtaaagacagtggagtcgttggattcataaacaaccggtgcatcgagtggttgtttcttctttaccggtgcgatggaatcaatgcgtaccgttaccgtatctgctttcaacgaatcatttccctgaagggaatccgtttgtgcggtattggaggcaatcattcctcttcttcgacgctgagacgtagcctcatcgggaagcatcagtaagacaatcagcagtatgaatgatataagtatttttgctttcaatggcgccattaactaatagtttacgcttgaagtggcaaaagtacacaatcttcaccaaatatgagttagaatcttcgttatttaaccttaattccgcaacactattataaattaaactttttaagtacctgagcaacaaaaagttgctcaggattttgccatgtcagaattttcacttatcttagtgttgcaaaaaaaacaagagaatccgacgatagacatggcgaagatacaaattaaatctgagagactcactccttttgggggattattttcaatcatggagcaatttgactccacattatcatctgtaatcgactcaaccctcggtctaaggtgtagatcgttcggttatcagtacagcgaaatcatccgttctctcatgagtatctacttctgtagcggttcatgtattgaggatgtcactactcatttgatgaaccacctctcgcttcatccgacacttcgcacttgtagctctgatactatcctcagggcgataaaggagttgacgcaagaaaacatttcatacacatcagatatgggcaagacctacgatttcaatacggctgacactctcaatactttattgctcaattgtatatttgcatctggccaactgaaagagggtgagatgtatgatgttgatttcgaccatcagttcatagagacagagaagtatgatgcaaagcctacatacaagaagttccttggttatcgccctggcgtggcggttattggcgatttgatagtcggtatagagaatagcgatggtaacacaaatgttcgtttccatcagaaggacacgctgaagaggttctttgcgagatttgaacagaatgggctcactatcaatcgcttcagagctgattgtggatcatgttccgaggaaatcgtggaggaaatagaaaaacactgcaagtccttctatatccgtgctaaccgctgcagttcgatctacaatgacacctttgctctcaaaggctggaaaactgaggaaatcaatggcattgagtttgaattgaactctatccttgttgagaagtggaaaggtaaggcatatcgacttgtgattcaaagacagaaacggatggatggtgtgcaggatttttgggaaggagaatacacataccgttgtatcctgactaacgactatgattcttccgtaagagaaattgtcgagttctataaccttcgtggaggaaaggaacgtatcttcgatgatatgaacaatggtttcgggtgggacagattgcccaaatccttcatggcagagaacacagtgttccttcttcttacagcacttatccgtaacttttacaaggccattattcaaagacttgacgtaaagaagttcgggctcaatgcaacaagtcgcataaaagcgtttgtcttcaggtttatctctgtaccagccaagtggatcaggacatcaaggcggtatgtgctgaacatctatacctgtaataatgcttacgcagatgttttccagactgattttggataatgcctacaacttatgggaatgatattgtgtattgcctcaagtcacattgtggggtaaggggatattgtaggcagaagtgggtgcttcaagttcaaattatctgcaaattcagtaatgagaggacgtgtaaacgcaataaggacgttcaagggcttagttgcggatttgaggtttaattattttttagtgctataaaaagagagaacaccatctatcaaagcggcttaggccttcttcaccatattttgcaatactttgccgcgctttttccacagttttctcttcatccagatgggttttagaaaagaatttatccgcaaagcaaatcaattgctcttccagggtaatgggcagcatctcacgatgaggaacggggagctgctgggcaatgatatcttccaacgagagtccggctcccgtatggcgttcgcacaccaatgcgtgttgggggaaaccttccgcccgcaagatttcagctcccaaatatccgtgggcgatataaggatgagtgccaaagcactgaatggtgggagcatcggtctgaaaaattccaatatcatgcaacagagcagcttctttcacaaaactccggtttaaacgcaattcgggatgagcatccagcattttcattgcctttccggacaccgccagactatgaattactaagatttgtctctgctgcgtattttccggataatatttatcaatggtttcgtatggattcatgtgctttattttttgctctcttgatgagaaattaatatttttgtgcaatattacaaaaaaaattaccgatatgcaaactcgagcttccttcattcttatatttctattcattatgttgtcaccaatgcgtgtaagcagtcaaattgtcacgggagcagaacaaatggatcaatatatgccgttgctgaaaggaaaacgcatcggaatggtagtcaaccacacttctgtcgtgggagcaaagcgggttcatcttctcgataccttattaaggagagacgtccgggtagtcaaagcatttgcccccgaacatggtttccgcggtaacgcggatgcaggtgaaacggtgaaagacggaaaagattcccgcaccagtattcctatcgtatcgctttatggtgataacaaaaagccgtctgccacccaactaaaagatgttgacgtgatcttattcgacattcaggatgtaggggcacgcttttatacctatataagcacgatgtattatgtgatggatgcttgtgcagagaacaagaaagaaatgattgtactggatcgccccaatccgtgcgactatgtggatggtccgatactcaaacctgcttaccggagctttgtcggcatacttcccattcctgtacttcacggatgtactatcggcgaactggcacagatgataaacggggaaggatggattgccaacaagaaaaatccttgttcattaaaggtaattccaatgaccgggtggaaacatggagagccttattcactccccatcaaaccgtcgcccaacctcccgaacgatcagtctatccgattgtatgcttcactctgtccttttgaagctacccgcgtcagcgtgggacggggaacaacttttcctttccaagtattaggcgcacctaataagaaatacggaagtttcacttttactccccgctccttacccggttttgacaaaaacccgatgcacaaaggtatcacctgctatggggaagacctccggaatgtaaccgatgtgaacggatttacactccgctacttcttgaacttttatcgcttatccggtgaaagcgcagccttcttctcccgtgcccgatggtttgatttgctgatgggaactgacagcgtacgcaaggctatcctcaaaggagaatcggaagaggctatccggaatagttggcaaaaggagttacaggattacaaagagattagaaaaaaacatcttctctatgagtaaaaaactagtatcatactctcattcatttttataaaccacttataattaaaagaataagtatgatagatacccatatttcatgaagaaagtatgatagatacaaaatttcagaaacatctatcattcttattcatcagataataactatattagcaaaaagaatgagagttatgatagttattttctactctaagaacaatcagttaataacacaataatgaaagataaaacacaaaaaagtttcaggggaatagtccggatattacttcttgttttctgttatacctttggtagtcatgcttttgcattggctttagagcacgaacaaacagtagatatttataaagtaacagatgtccccaatccgcgtaatgaaagctcttccaattgggtcagcaatccgaatcagatattggatgaaagttatgtgtggggaataaataatatgttgtcacagttagaagattcattgagtattgaagtgacagttgttgcactcccttctatcggtgaagatattccggcagagtttgcccacaagctttttgaacactggggcatcggaaagaaagcggacgacaacggattactgattcttttagtactcgatcaacgtaaagtcactttcgcaaccggatacggtttggaaggagtacttcccgacgctttatgctttcgcattcaacagaatgaaatggttccgtggtttagaaaaaacgactttgacagaggaataacagagggagtccgggctgtaacattggtgctttatggaagcgactatgagcccgtttctcaaggcacttctgataattactggaaaagtgccagcaatacgttgtggaattttctggcaaatcagccgcctatgctttgggtattcttgatactggtaaatgttatcacttacctcatgaaggtaaataaagctcgccccaaagacagttcagcattagcagcaatcaaagtcctgacactttacaacccacttggatgtcttgtattgttttttctagtctggcctgcacttattgcggcatccttatggtacaagttctaccaaaaacaacgtgttattttgcagagtaaaacctgcgattcttgcaaagctgtggctttacaacttttacccaatgagcttgcaacccctttattatctgcttccgaacaaatggaacacaaactaggttctgctatccaccgtatttatcaatgtacttcctgcggctggcttttacggtataaatctatcaccataagcgaatataggatgtgtaatcaatgccataccattgcttccaagcgtatcagcccgtggaaaacaattaaagagcccacatattccgatgccggattggaggttgccgactatctttgcctgatgtgcggagataaaaagcagacaacacagaagatcccccgcaagacaccccccaatagtgacagttctagtaatagtcacagtagtagtggcagaagcagtagtagaagtagtagcggcagttttggtggtggacatagcggtggcggtggagcgtcaagtagtttttaagatcaactatccatccgaagaagtcgactaaccaaataaaggacatgaaaacacatctcacctgaatattttcatagaaagatggttgtccactcccttattctaactatttttgcatagataaccgaacataaaaaagtgaaatgaatatagaagaatttagagaatattgtctgtcttttaaaggagttcacgagaagatgccttttcccaatgtacccgaccaatatagccgtgacgttctatgcttttatgttgcggacaaatggttttgtttcgttaacattgagattttcgatttttgttgcatcaaatgtaaccctgacgaatctggagaactgcaaactgaatatgccggtataaaaccaggctggcacatgaataagaaatattggatcagcgtttatttcaatcaagacgtatctgatgataagatcaaagaactcgtaagcaaatcctatgatattgtagtcaaaagtctgacaaagaaagaacgggtttctgtttgagattgcaaaaagtcttccagtgctttcaggtcttttatttcaaatattctttccatcgttttcattttcagctccgatgtcttgtgttggggaatgttttacatttttcacagcgtgcactattcaattgcgctcccagacaagttttttttgccgtgtataggtaggacacccaccacaaaacacgccacatgccgggacacgaccattataaattttcatcatacaaggcttttggccatccaatagttagtaagagacagctgattagccctgcgtttttgctctacttctactatataccctcgcttttcaaaaaatggacgggctgttatactcacttcagaggtaatccgcgtaatcccggctgcgacggcataacgttctatctcattcaacaatagtgtagcaacacctttgccctgaaaatccttatgaataaacattgaatgcaaatagccctgaggtgtaatggatgaaaaaccgacgatttcagattgccgattaacagcaacaataaaatagtgagtttttatcataccctctattttagaaggatcatctccgcacgatgcccaatcttcaacctcggcctgtgaatagtcacgcctgtttatcactaacactgtgtttcgatatagagactgaatttcctctatatccgtatttaaagctatccttatagtaatcatataatccctaattattcacaattttatctctttctctttttccacaactgccacgaattgattatattctgccacaacacatacgaaccgggagccacagaagacaatggattcaaataggtatgcgccatccaaatagccagaattgtattcttttgtccaagtgcttgcccaccactgatacggtcattataaatcgagccgattgtcttccccaaaaagaactgcaaacaacaggcaatcagtgctccgacagcaatcatgatttccgtaaaaccatccgccgggtcattgagcaaagaatacaatgtttgcgcagttacgatagctaaagatacagcccacaaataaaaagcaagttcatgataacccaataacttctgatgtactttcggcaaacacttgctcaacaaccaggcaaccaaaaaaggacaaattaacaacggaaataccttacccaaaataacaagaaacgcctcccaaaaagtgacatcaggatggacctccaccaaaggaaaaagaatgggcacagcaatagccgctccaatatttgctatcaatgtataagtagtcagactggccgcactccctcccaacttggaagtaatcaccgcagcagccgtagccgttggacaaataatgcaaaccatcactccttctgctacaattttatcaaagcgataaagcaacagataagcagccaacgctccaccaatctgaatcaataacaaccacaaatggagaggttttggcttcaaatcacgaggagataccttacagaaggtcaatagcaacatcgtaaaaataagataaggagtcaggaaagaaaggctgataaacagcggataacctatagcacctaccagcatagcaataggtaacgtccaattcttcaaaaacttaagcatcgtcgtacattttaacttcgaagcacaaagtaacggagatttcaggaaaaaagctatcattaaaccgaaaaaaacacaaaacttaatggcaaataatgagttttctacaaatttctactacatttgcaccgtattatagatatgaaactgaatagaccgtacatattatacatattcatttgcctctggctgctttttctaccctcatgtactaaccacttatgggggaaggattttgtagtagttatcgacgcaggacatggcggacatgatccgggcgccatcggcaaaatctcgaaagagaaaaatatcaatctgaacgttgccctgaaagtgggaaatctgattaaaaggaattgcgacgacgtcaaagtgatttacactcgtagcaaagatgtattcatccctttggaccgacgcgcagaaattgccaacaacgcgaaggctgacctctttatttccattcacaccaatgcattggctaacaaccgtaccgcaaaaggtgcttcaacctggacactgggtttagccaaatcagacgctaatctggaagttgccaagcgagagaactccgtaatcctctacgaaagtgactacaaaacaagatatgccggtttcaacccgaactctgccgagtcatatattatatttgaattcatgcaagataaatacatggagcagagtgtacacctagcttcactgatgcagaaacaatttcgccaaacttgtagaagggcagaccgtggagtgcatcaagccggattccttgtcttaaaagcgagtgccatgccgagcattctgatagaactaggatttatctctacgcccgaagaggagcgctatctgaattccgaagaaggggccggcaccatggcaaaaggcatctaccgtgctttcttaaattataagagagaacatgaactgcgcctaacgggagtcagcaaaacgatcgtcccaaccgaacaggaagaagacaataccccggcaactgcccaaaaggataccgaaagcgtgaacacagctccccaacaggaaaagctattggccgaagcaaaaacaaaacctgccgcaacagcaaaaacagcaccgaaacgcccaattgtagtagagagtgcaaccaatgacagtgaaattacgtttaagatacagatacttacttcttccaaacctctcgccaaaaacgacaaacggctgaaaggactgaaagaggtagattattataaggaagggggaatatacaaatatacgtatggagcctccgccgattataataaggtgttgcgtacgaagcgcaccattacggcacaattcaaagacgcctttatcatcgctttccggaacggcgagaaaatgaacgtcaatgaagcgattgccgaattcaagaaaagaagaaataaataaaaagataaaatgaagtacattacaaaagaagtcagaataggtattgcaggtatcgttgcactatgtgtgcttatatacggaattaactggctgaaaggtatacacatgtttcaaccttccagctatttctatgccaaatttgaaaacgtaaacggactcaccaaatcaagcccggtatttgccgacggtgttcgtgtaggtatcgtacgtgacatctattatgattatgccaaacccggaaatgtaattgtcgaagtggaactggacacggaactgcggattcccaaaggaagtagtgccgagcttgtatccgaacttatgggaggcgtacgcatgaatattcttctggcaaacaacccgcgcgaaaaatatgccgtaggagatacgatccccggcacactgaacaacggaatgatggaaagcgcggcgaaactgatcccaaaggtagaagaaatgcttccgaaactggattctatcctcatctctctgaacaatatattaggagacaagagcatccctgccaccctgcactcgatagagaagacaaccgccaacctggcagtagtcagttcgcaggtaaaagggctgatgagtaatgatattcctcaactcaccagcaagctgaacaccatcggagacaactttgttgtcatcagcggaaatttgaaagaagtagactatgcagccactttcaaaaaaatagacgaaacgctggctaacgtaaaaatacttacagaaaaattaaacagcaaagataacactatcggactgctcttcaacgacccgactttatacaataatctgaatgcaacaactgaaaatgcagccagcttattagaagacctgaaagagcatccgaaacggtacgttcacttctcattattcggcaagaaagacaagtagcaaattatcgttatatagattttatctaaataacgaagggctttcaaaagaaagtagattgctcttcaaatgtctatctacaaaccgaaataatattcccgtacaaacgtacaaaagtgagaaaaaaggctaaaattatatatataagacattaacatacagatacttataaaactgcaagagagggtaaacagagtgtgtccgacaacaaacgcataagtcattgaaagtaaacacattattgttagcatgaaaaaaacaagaaaaaatagatttgttttttccgaataagattcccaattttgcaaacgtagaagttttgcttaattaataaatgtattaaaagttactatgattgaatcaaatcatgtcgtactttggaaccgctgtctcgacgttattaaagacaatgttcccgagacgacatataatacttggtttgcccctattgttccgttgaaatatgaggacaaaacgttgatcttacagatcccgagccagtttttctatgaaatactggaagagagattcgtagatcttatacgtaagacattatataaggtcattggcgaaggaaccaagttgatgtacaatgtcatggtggacaagacttcgattcctaatcaaaccgtgaatctcgaagcaagcaatcgttctacggctgttactcccaaaagcataatcggaggaaacaaagctcccagcttcctacaggcccctgccgttcaggatttggatccgcatttgaatcctaattataattttgagaacttcattgaaggatacagcaataaactttcaagaagtgtggcggaagccgtagcgcaaaaaccgggagggactgctttcaacccgttattcctttatggagcatccggagtaggaaagacgcacctggcaaacgcaataggcacgaaaatcaaagagatttatccagagaaaagagtattgtacgtttcggcacatttgttccaggtacaatatacggattctgtacgcaataacacgaccaacgactttattaacttttaccagacgatcgatgtattaatcattgatgatattcaggagtttgccggagtcaccaagactcaaaacaacttcttccatatcttcaatcatttacaccagaacggcaaacagcttatattaacttcagaccgtgctcctgtattgttgcaaggtattgaagaacgcctcctgacccgtttcaaatggggtatggtagccgagcttgaaaagccgacggtagaacttcgcaaaaacattctacgcaacaagatccaccgcgacggattacaattcccgccggaagtgatcgattatattgccgaaaatgtgaatgaaagtgtacgcgatctggaaggtatcgtcattgctatcatggctcgttccactattttcaacaaagaaatagatttggatttggcacaacacattgtacatggcgtggttcataacgaaacaaaagcggttaccatcgatgatatcctcaaagtggtatgcaaacattttgatctggaaccgtctgccatacatacaaaatccagaaaaagggaagtcgttcaagcacgacagattgccatgtatctagctaaaaaccacacagacttttcaacttctaagataggtaagtttatcggtaacaaagaccatgcaacggtacttcacgcctgcaaaaccgtaaaaggacaattggaggtggacaaaagctttagtgcagaagtacaggaaatagaatcgttactgaaaaagagaaactgaaatcaagtattaagtataaagtattaagtattaccctggtgcgaaaccgtataataaagcctgtccgcatggataatactttatacttaatacttgaaaaatacttaatacttatttcaagaatccttgctggcgaagtactttcaatagattttcggacataaattcgttatctttctttgtgtaacgcacgtccgtaaagacttgagccaatgtttcttttttattttcttcgataaactgcttgttttccggcaatgattctttgtaggcatagagtttatctatttcttccggtgtatagtcgtgatatttttcatcgtgcacggcagcttccaaaggcaaacgatctacttgtgcgggaataccatccggatagcctaccgttattgtggtgagagggaataccagttcggggagttggagggtatcaataatcatttgaggattataagtggtagttcccaaataacaaatgccgagtcctgcttcttccgccagcgtacaaaaagtctgcgcaacaagcaaagtatccatagacgcattcataaaagacattaaattatcgtagcccggcactgctttccgctgttcacaccatttgctgaaacgacggaaatcagcacaaaaagtcagtacgaccggagcattttttaccatcggctgattgaaatgagcaggcgaaagtttctccttcatttccgcatcgcgagtcacaatcacactataaagttgcatcccacccatcgtagaagcacggaaagaggtttcaagcaaatcatttaacaaactcggatttatatctttaggcagatatttccggatagttcttctgttttttacggtttcaaacatatcttttttttgcaaagatataaaaagaaaaaaatattccaccacactagcagaatagaatagttttctttttggagaactttaacctttgaacaaatttcaattttatctgtttatcaaatacttagcataaacaaatggaaaacttgcaacctgttaataaattaattcatttttattttgatagatgaaaaaacattcttagctttgcgcctacatttgttaacgataagtaaacttctacatattacttattaaaaacgagatttaacacaaattgaatcgtggaaaaacagatttattcttacgacgaagcctatgaagaatctttacgatattttcaaggcgacgagcttgctgcaagggtttgggtaaacaaatacgcagtaaaggattctttcggtaatatctatgaaaaatccccggaagacatgcattggagaattgcaaatgaagtggcacgcgtagaatcgaagtatccgaatgcgttgacagcaaaagaactgtatgatttactggatcacttcaagtacatcgtcccccaaggtagcccgatgacaggaatcggtaacgactaccaggttgcttcactatccaactgcttcgttatcggagtggacggtgcagccgactcttatggcgctatcatcaaaatcgacgaagaacaggtacaactaatgaaaagacgcggtggtgtaggtcatgacttatcacacatccgtccgaaaggttctcccgttaaaaactcggcgttgacttctaccggtcttgttccgttcatggaacgatattcgaattccactcgtgaagtagctcaagacggacgtcgcggtgcattgatgttgagcgtgtctatcaagcatccggattcggaagcattcattgatgccaagatgaccgaaggtaaagtgaccggagcaaacgtttctgtcaagttggacgacgctttcatgcaggctgccgtagacgaaaagccgtatgtacagcaatatcctatcgactctgcccaacctacattcaccaaggaaatcgacgcttctaccttgtggaagaaaatcgttcacaatgcatggaaatcggcagaaccgggcgttttgttctgggatacgattatccgtgaatctgtgcctgattgttatgcagacctgggttacagaacggtatctaccaacccatgcggagaaatccctctatgtccttacgattcttgccgcttactggctatcaatctatattcttatgtggtaaatccgttcaaaccggatgcttattttgatttcgacctgttccaaaaacacgtggctctcgctcaacggatcatggacgatattatcgatctcgaactagagaagatcgaacgtatcatgaccaagattgacgaagatccggaaaacgaagaagtaaaacatgcggaacgtgcactttgggagaaaatctacaagaagagcggacaaggtcgtcgtaccggcgtaggtatcactgcagaaggtgatatgcttgctgcattaggattgcgttacggaacggaagaagcaacggaattctctgaaaaagtacacaagacagtagctctcggtgcctatcgttcttcagtggaaatggccaaagaacgcggtaccttcgaaatatacaatagcgaacgtgaacagaacaatccgttcatccaacgcctggcagcagctgatccgaaactatatgaggacatgaagaaatatggtcgccgtaacattgcctgcctgacgattgctccaaccggaacgaccagtttgatgacgcagaccacttcgggtatcgagcctgtattcctgcctgtttacaaacgtagaagaaaggtgaacccgaacgatacgaatgtgcatgtagactttgtagacgaaacaggggacgcattcgaagaatacatcgtattccatcataaatttgttacctggatggaagctaacggatacgatccggccagacgttacacccaggaagagattgacgaactggttgccaaatctccttattacaaagcgacttctaacgatgtcgactggttgatgaaggtgaagatgcagggaagaatccagaaatgggtagaccactctatcagcgtaaccatcaatctgccgaacgatgtggacgaggatttagtaaaccgcctgtatgtagaggcatggaaatccggctgtaaaggttgtaccgtatatcgtgacggttcacgctccggagtgctgatctctacgaaatcggataaagacaagaaagaaggacttcctccttgcaaaccgcctacggttgtagaggtacgtccgagaatattggaagcagacgttgtccgtttccagaacaacaaggaaaaatgggtagcttttgtcggattattggacggacacccctatgaaatattcactggtttgcaagatgacgacgaaggtatcttgctgcctaagagcgtaacttgcggacgtatcatcaaaaatgtggatgaagacggtaccaaacgttacgacttccaattcgagaacaaacgcggatataagacgaccattgaaggattgtcggagaagttcaacaaggaatactggaactatgcaaaattgatttccggcgtgcttcgctaccggatgccgattgaacaggtcatcaaactggttggctctctgcaattgaacagtgaaagtatcaacacttggaaaaacggtgtagaacgtgcattgaagaagtatattcaggatggaacggaagccaaaggtaagaagtgcccgaactgtggcaacgagacattggtttatcaggaaggctgtctgatttgtactacttgcggcgcttccagatgtggataatagtcctacgtatgttaattaatatataaacaaaagattaaaaggagtccggtgcggctccttttattttttattcaaaaaaatgtcttatacttgcagtgtcttacatatacaatcaaaatctaatatatatgattctatcatttaatattgaataccgcaccaattggggagaagaagtaaggatttccggcttatttccggaatcaattcctttacacaccaccgatggtatctattggacggcagaacttgagcttgaagtccctcaagaagggatgactatcaattatagctatcagatagagcaaaacggaatagttatccgcaaggaatgggacagtttttcgagatctattttcttatcaggaagctccaggaagatatacagaatcaatgattgctggaaaaatatcccggaacaactgtatctttatagttctgcttttacagaagccttactggcacatcctgaaaaagagaatatcccgcaaagatataagaagggactggttatcaaggcctacgccccatgtatcaacaaagattattgcctggcaatttgtggcaaccagaaatcattaggtcactgggacccggagaaagcggtattgatgagtgacaccaatttcccggaatggcagatagaattggacgccagcaaactaaaatatccgctggaatataaattcatcctctacaacaaacaggaaaagaaagcagactgctgggagaaaaaccctaaccgctatctggcagacccggaactgaaaaccaacgaaacgctcgtgatttccgaccgatatgtttatttcgacatccccgcatggaaaggggcaggaatcgctatacccgtattttctttaaaatcagagaaaagtttcggagtaggtgatttcggcgacttgaaacgtatggtcgactgggcagtaaatactcgtcagaaagttattcagattttaccggtcaacgacaccaccatgactcatgcatggacggactcttatccttataacagcatttctatttatgctttccatccgatgtatgcggatatcaggcaaatgggaactctgaaagataaagaagcggcatcgaaattcagcaagaaacaaaaggaactgaacagcctccctgctattgactacgaagcggtcaaccaaactaaatgggaatttttcaacttactgtttcgccaggaaggagaaaaggtattggcttccaaagatttcaaagatttctttgaaacgaacaaggaatggctgcaaccttatgcagtctttagttatctgcgcgatgcctacaaaacgcccaatttccgcaaatggccgcgacactctgtttaccaagcggaagatatagaaaaaatgtgccaaccgggaacagcagattatcctcacatctcgttgtattattatatccagtatcatttgcatctgcaattgttgtctgcaaccgaatatgcccgccaacacggtgtcgtattaaagggggatattccgattggtatcagccgcaacagcgtggaagcctggacagaacctcattacttcaatctcaacggacaagcgggtgctccgcccgatgatttctcgatcaacgggcaaaactggggattccccacatacaactgggatgtcatggaaaaagacggataccgctggtggatgaagcgttttcagaaaatggcggaatacttcgatgcttaccggatcgatcatatcctcggttttttccgtatttgggaaataccaatgcacgctgtacatggattgttaggccagtttgatccttctttgccgatgagccgagaagaaatcgaaagttatggtctaacgttccgcgatgaatatctgctaccattcatccatgaatctttcctcggacagttgttcggaccgcatacccatttagtcaaacaggactttcttcaattgattgatgactccggactttatcggatgaaaccgggattcgaaacacaacgggaggtagaacaattctttgctggtagaaatgatgaagatagtatctggattcgggaagggctttattcattaatcagtaacgtcttatttgttgcggataagaaagaggaaggtaaataccacccgcgtatcggtgtgcaacgagatttcgtattccggtcgctgaacgaagaagagaaaaatgcgtttaacagactatacgaccagtattattatcatcggcacaacgagttctggtatcaacaggctatgaagaagttacctcaactgacacaatcaacccgcatgttggtttgtggagaagatttggggatgattcctgcttgtgtgtcgtcggtgatgaatgagctccggattcttagtctggaaattcagcgaatgcctaagaatccgatgcatgaattcgggcatttaaatgagtatccgtaccggtctgtctgcacaatctccactcacgatatgtctacgttgcgtggctggtgggaagaagattatcaacagacccaacgttactataatgcaacgttaggacattatggagttgcaccgacaactgccaccccggagttgtgcgaggaaatcgtacgcaaccatctcaacagtaattccattctctgtatcttgtctttccaggattggttatcaatagacgggaaatggagaaatccgaatgtggcggaagagcgaattaatgttccatccaatccacgaaactactggagataccggatgcatctcactctggaacagttgatgaaagcaaaaacactcaatgataagattagcgaattgattaaatacacaggaagagatccgaataaatagaataaaaggtacaagtaactttcaaaaaggatattttccggacactaccgacgcggataacactagattaagaacgctaaaaatctatgtgatccgcgtcattcgtttttcaaggatatattgataacagaggtaaaataaggagtttcaaaacatagtcaaccgtttttttcgcaataatatcattactatatatcatactttttcgcttttcgcatcattcgtttattttttcaatgttcctctttttattccgatttataaagtatctttgcgccgaaaaagagaaattaaaagagataatggaaggcaaccagagcagacgtattgattttgtggacttaaccaaaggagtctgcattatccttgtggtaatggcacacgttggaggggccttcgaacaactggatacgaattcgatgttatcctgtttccgcatgccgctttacttctttatctcgggagtgtttttcaaatcatacgaaggcctgttcggattcatcctgcgaaaaataaacaaattgattattccttttcttttcttctatctaagtgcatttctaatgaaatacattgtttggaagattgctccgagggtatttcaactgcctgtgtcgtggaatgaactcttagttgtatttcatggacacgaccttatcaagttcaatccaccgatctggtttctactcgcattattcaattgcaacatcctgttttatctaattcactttctgcgcgaaaagcatctgcctgtcatgttcgctgtgacaatcctgattggttgcgcaggattttatctcggaaaattacagatagagttacccctgtatatagatgtttccatgactgccctccccttctatgtggccggtttctggatccgacggtataatttctttctatatcccagccatcgtttcgacaaactgataccggtttttgttgtattggcactggtggtaatgtactttaccgctactacattggggatgcgtaccaacaattatacgggaaatatttttcaagtatatatcgctgcgtttgcaggaatatttatgattatgttactttgcaaaaaagtgaagaagataaaggttgtttcttacttaggacgatattcaatcatcaccttgagtattcatggaccgatacttcattttttaggtccattagtcagccgttatattcacaatagttgggcacaagcaagcgcacttctgcttataacattaagcatctgccttctgctcacacccgtctttcttaaagtgattccacaaatggttgcacagaaagacctgttaaaagtcaaacaagatcacactaaaaagacagtatatgaagataaatagtagctatattcttttgaaggaaattcgttgttacgcctatcatggagtcgcaccgcaagaaaatctgattgggaatgaatatctcattgacctgaaactgaaagtagatatcagcaaagctgcccggacagatgaagttaccgacaccgtcaactatgctgaagtacatcaggtgatagaaaatgaaatggctgttccctcaaaattgctggaacacgttagcggacggattatacaaaaactctttgaccaattcccctgtattgaagaaatcgaactccggctttccaaacgaaacccaccgatgggagcagatatagagtctgcaggaattgagctacactgcagcaggaaataagataatcacagctggaaatgaaacataaatgacgaaatgcagataatacgatattaataaagtaatccgtatcatctgcattcctttttaagcaagatctgcttctattttcacagccgtaaactaccggcttattttctcttcttttttcttctatttaccgattctacagcctccgtcaccacgggtttatcctggaaacgttttgtatagctggaatagtccggatgaatgcgttcgtaatcaggatccataaataacggactggaaataatatgatccgccgtagaacggttacaacagaaaacaatattttctacaccggccaaacgggttaatgcttttacatccgtatcatgcggttgcaatgtcatggggtccgtgaagaaaaagagataatcaatctgcccatccacaatacgtgatcccatctgttggtcaccacctaacggacctgattttaaaatcgtaaaatcccactcttcatcaggatgtttctccttcaatgcttccaatatcaaagtacccgtagtacctgtacagtagaatttattacccatcaacagttccgagttccacagtacccattcgatgaggtcttttttcattgcatcgtgtgctaccagcccgatgcctcttctaacctttgattccatttgctatctttttaaaatccgacaattgagagaaccgtttgcatcctctcgcataaaactgccacaagatactactttttgtccgttcaggtatcggattcaaagttttttttctcatattctcttcacgggataaagaaaatgacggacatagttgtttatactctttccgcgcacgtatcacagcacgagcattgtcccagtgcccttgcaacaagaaattaaacgctgccacataatcgagacaggcccggatacgcatcactttatttaactccttctgtggaagattcttatagagcatgacaagattattacggaaattaagaaaagtcttacgaggattctcttttttaagagtagctcctcctacatgatagacaatactttgaggtacacagacaatctcacgatttcgcgaacgaagtcgccagcacaaatctatttcttccatgtgagcaaaaaaacgtccatccaatcctcctacattcacataatcagtgtgccggataaacaacgctgcccccgttgcccaaaaaacaggaatcaccgtatcatattggccttcatccttctccacaactcccattatacgccccctgcagaaaggataaccatatttatcaataaagccaccagccgctccggcatattcaaaatattctttttgtcgttgacttcgtatcttcggctgacaagcagccacctccggatgagcatccaaataagcaatcattggttccagccaatgctccgtcacctcgacatctgaattcaaaagaactacatattctgcgtcgacctgctgcaatgcccaattatatccatcggcaaagccataattttggtcgagcacaatcgttctgacagaaggaaattcctgttgaagcaaactcacagaagtgtccgtagagccattgtcagctacacagacctcaaccccctccccctctgaatagcggacgacggacggaagaaaagtacgaagcatatcgcacccgttccaattcaagattacaactgaaaccttcatcattattctttcttcttattcaattcctcctgttccagctgatcagcctcttctttggttaatttccagcgtttatgagaccataaccagtatgccggttccctgcgaatcgtttgctccaacctatgggcaaacatttctgtgatttctccttctcttgtttctttcggtgtttccgtcattaacttgaactccgcttcacaataccctctacgcttcttactaagctcacaataaaaaacagggaagttcatcattttagcaatacgctccgcaccatccagaaaagccgtctcctgccccaaaaaagtagtccagtatttatcatacccactgggccattgatcggtaatcagcccaactaccatctttttcccatcacgtttcaacttaataatttcacgtgctgtagaatgtttcgggatattatatcccccgaaacgagaacgaatacgtttaaataattcgtccagatatttgtctctcaatggtttataaacttgcacagggacatcttccggtttcatgattgatcccatacctattaaccactcataattggcgtaatgaggaatcattactataatacctccatacttttcagttagttccagatattgctccgtattcttataagtcattcttgcacaaagctcttcggcagacatatgcaacaatttcaaatcctcaagcatataatccgacagataacgataaaatttacgctctatctgcaatctctccgcatctgttttttccgggaacgatctaagcaagtttccccgaaccactctccggcgatatttcccaatacgatacatcaacagacaattaagatccgagagcatatacaaaacccggaacggaagtgccgaaaacaaccacattccactatataccagccaatagataagtttggatctcatacttatatcaaaattgtacttttaagtgccgtcctctcttcattaaagtctcccaggcgtacgttaaccacccgattatccagtgaatcatcattttccacctctacacggatataattctccgtaaacccatgcatcggaacacctgtcttcgatttttccatcagcaccggcattacctgcccgatatgacgcgcgtaaaaagcctgtgtcttttggtccgatagtgtcaacagacgttgactacgctgatgcttctcttccggagaaaccacatattctatttttaaggcttgcgttccaggacgttcggaatagctaaacacatgcaactgcgtcacatccagtccatcaataaactgataagcctgttcaaagtattcgggcgtttctccacgggttcccacaatcacgtccactccgataaaagcatccggcatcacctcttttatcttccttactttcgaagcaaaaagagcagtgtcataacgacggcgcattagctgcaaaacctcatcacaaccggattgcaaagggatatgaaaatgaggcataaaactgcgggagtgagacacaaactcaataatcgcatcagtcaacagattgggttctatggaagagatacgataacgttcgattccttcaacctgatccaatgcttttactaaatcaaagaaactctctcctgttgttttgccaaagtctccgatattcactccggtcagaacaatttcttttcctccctcggcagccgcttgacgggcctgttcaaccatggaagcaatagtcccgttacgacttcgtccccgggcaaaaggaatcgtgcaataagaacaaaagtaatcgcatccatcctgcaccttcaaaaagaaacgggtacggtctccccgtgaacacgagggagagaatgaacggatatctttggtcgtcgtagtgatagcttctcctttttcatgcttttggaggtcgcccagatattgaagcaattctcctttctgttccgctcccaacactacgtccactccatctatctttgccacatcaccgggcttcaattgcgcataacatccggtcactatcacaaaagcaccagggtgttgttttaccagacgatgaatcgcttgccggcatttcttatccgccatctccgtcaccgaacaggtatttaccacacagatatcagctttctctcctttacgcgcagtccgaactcctacctcacgcagaattttaccaatagttgaagtctctgaaaaatttaatttgcagcctaaagtataataaacggctgtcttattttgaaatacagtggtatctatcataagctgttataaacacattaactttgcaaagttacacattattattagtaaaacgcttttggatacgaaagtttattcctatttttgcacaattcactaaaaaacgtgcaatgattaaagagaatttcattaaactatacgaaaatagttttcgtgaaaattgggatctaccttgttacacagattatggagaagatacccaatatacttatggggaggtagctgaaaaaatcgcccgtttacatctgttattcaaacattgtagcctccgcagaggggataagatttcagttatcggcaaaaacaacgctcactggtgcatcgcctatatggcaaccatcacgtatggagcaatcattgttcccatccttcaagactttacccccaacgatgttcatcatatcgtcaatcattccgaatctgtatttctgttcaccagcgacagcatttgggacaatctggaagaggaaaaattagccggattacgaggcgtattctcactgaccgatttccggtgtctttatcagcgtgacggagaaaccatacagaagtttctgaaaaataccgataaagagatgcattctttgtatccgaaaggatttacccgtgaagatgttcagtataccactttatccaatgataaagtgatggtgttaaactacacttccggaaccactggtttcagtaaaggtgtaatgctgacaggaaacaatcttgccggtaacgtcacttttggtattcgtaccgaactccttaaaaagggggataaagtgctgtctttccttcccctcgctcacgcatacggttgtgcatttgactttctgacagcgaccgctgtcggcactcacgtcactttgcttggaaaaacaccttctcccaagattataatgaaagcttttgaagaagtgaaacctaaccttataattactgtcccgctagtaatcgaaaagatatataagaatattatccagccgctcattaataaaaaaggaatgaagtgggcactcaatattcctctgctcgacacccaaatctacaaccagatacgcaaaagactaattgatgcactgggaggccggtttaaggaaatcattatcggcggtgccgctatggacaaggaagtagaagaattcttctacaaaattaaattcccttttactataggttacggtatgacggaatgtgggccactaatcagctatgccccttgggatgaatttgtactaggctcttccggaaagattctggatataatggaagcacgtatctataaagaaaaccctgaagcagaaaccggagaaatccaggttcggggagagaatgtgatggtgggctattacaagaatcaggaagcaacgcaggaagtattcacgcaggacggctggctacgcaccggtgatctcggttccatggacagcaacggaaatattttcatccggggacgcctcaagaccatgatcttaagttcaagcggacagaacatcttccccgaagagttggaaacaaaactgaataacctgcctttcattcttgaaagtctcgttatcgaacgcaacaaaaaattagtagcactcgtttatgccgattatgaagcgttggattctctcggattaaacaatccgaataacctgaaaacaatcatggatgaaaatcttaagaatctgaacagcaatgtagccgcttatgaaaaaatcagcagaatccaactttatcctacggaatttgaaaaaactcccaaaagaagcataaaaagatacctatataacagtattgctgtcgattagcatgttctaaaacatacgaaaaagggagaaaagtagctagttacaaaaaaaattataaaaaaagttggtatttcgagaacaacatattgaaaaagtacataactttgcagcgttttaataaagcaattgattgtattacgtttttaaaaagcaaagaaaatgaaaaaattagttttgatggccgtagctatcgtagcagtatcattcgcatcatgtggtaacaaagcagctgacgcagcaaaagcaactgcagattctatccgtatcgctgactcaatcgcagcagtagaagcagcagctcttgaagctgaacaagcagcagccgcagcagcagattctttgaatgctgatagcactgcaactgaaactgtagctgaataattcagaaacagcttagagagaattgaaagtctgccatgcaaaagcatgcacagactttttttatgcttcaattttagcaattcacacgctatttagcgtatgaactcttcacaaaaggagcgtccaacaaataatccaagctcacttccacactctcttctaccggcatactataaccctcgatttcagcaacgagatagttaacacctgcagtttttgcattcttaaagatagcgtcaaaacctaccattccgctttgtccgatctctctgtgatccttaacatggaatatcttgaagcggccgggatatttattaaaataatcaacaggactgttttgtccgcgaactacccaataaaggtccatctggaagaagacatattcaggattcgtatgttccagcatataatcatacattactttatcttctactttctgaaattcatgagcgtgattatgatatccaaatgacaaaccttgttgtttgcaacgtttgcctatctcattaaaataagtgcaatatgtattcaaatctttaagcgtttttggaacatccatccaaggagctacgatgtacttcattcctgcagctttatgatcggcaatacactgatcccaccattgaagagactctgacaagtcaccggaagccaattcttctttggacaattgtctggtacaatgtgaagacaaaacttttaatcctgccgattcgacatctttcttaaactgttggggagtccggtcataaaatttaccgttgttataattggcagcttcaacaccggtatatcccatgtttgccaatttcttcagaagagcagtataagtggggtcacacttaccatttttattgtctaccttattcaatatatctctgacagaatagagttgaatagctacttcttttttagctttcttcttagtttgtgccgtcattgcctgtggaatcatgaaaagagcagccaacgcacataaataaatttttgttttcatataatagatatcaggggattacaattattagatttatatagaaaaaacaggcacggattacacagacctcacggttactctatggcaatcgccattcaaaaaaacgtgaaatacgtgtaacccgtgccttcttattactatttgattagtccaaaaccttcacgcggatgttgcggaaccaaacatcatcaccgtgatcttgcaaaccgatgaaaccttcgtgattttcgccaccacagttattcagcaattcaaatgccaaaggccatttatcttcgctgaacttacttgcctgcaacatatcagtccattgttttgtccacaaatgatattcaagtacgttttcatcgttttgtccatgaaccactgtacctttataaaccataatcttagccttgttccattcgccaaacggtttagagttttgaggaactgccggaatcatgtcatacaaagaagccgactgacgattgttatctttacccaatttagcatccggatgattggcattatccaagatctgatattcaggtgcggaaatataaataggttcaagcacatcattaccatctttgtctttagaagtaacttcctgagctaaatacagaatacctgaattgctacctttagcaaccttccattccaattccaactcgaagtttttaaatttgtgagcaaagatcaagtcaccaccatcaccgtcttgagcttcaccgccgccagaaccgttgaatttgatacagccatcttcgattgtccatttagtaggaacacggtcttttccataaccacgccatccgttaaatgtttcaccatcaaagattgtgatataaccattttcgtcaacaggcagattcaaactatcagtttccggtgctttcaatgatttagagtaagacaatgcaactttgctcggttcttcctgagcatttgcttttttctgaccaccgcaagaagcaaaaactcctgcagcaagacaacaacaagctaatggataaaatacttttttcatgataataacgatttaattttttatctttaatttctaatttatctcggcatatcaggcagtctccagccgtcacgataagtatgtttcactaattcagcagcaaactgtttcgcattaatcggatcagtccatgtcttgtcaaatgtcggatgaccatcatgaatcttgaatccgtctttgataacggtacggatcgtttcgttatcaccgatattcgtaaagcacatgttagctccatcccattcaagagtcttattcagcgcttgcaaacgaatagccaatacacccattgccaccatttcattcattggtccggcttctgagaaatcagacttagtcatgatacggttagatttattttctttacatgcacgtacccagtccatctcgtgaccaccgttcatagcattgggaacacgacgacaaacctttggcgcatttggtttacgaccagaaagcaaccaaggattctgtccataacatccgcaaatcaaagtatctttcgttccgtggaaaatagtcaaaccaccaccactctgcatcagttgttttccttccgggaatcctttcggacgttcaggcatcataccgccatcataccaatgtacttccacttcaggcatagctactttcggcatattttcacgagcagggaaaatcattttcacatgctgtgcctgcggagcacaagcattcaacaataaagtagatgacccttccactttagttggatattgcaatttcaatgctctaaacggctgatgcaaaatatggcaagccatatcgcctaatgcacctgttccataatcccaccatccacgccagttccaaggatgataaatagcattgtaaggattcattttagcaggacctgtaaacaaatcccaattcaatgtgctaggaattttatcaaccttttcaggaacattcaatccttgcggccaaataggacggtctgtcgcacattccaccttagttatatcaccgatttcaccattccaaatccattcgcataccaaatccgtaccttcatccgatgaaccctgattacccatctgagtaacaacacctgttgaagcagctaaatttgtcaataaacgagattcataaacagagtgggtcaacggcttctgacagtacacgtgttttcccattgtcattgcatcagcagtgatgatagcatgagtatgatcggcagttgcaataatcacaccgtcgatagatttacccatttcttcatacatcttacgatagtcccagtattttttagccttggggaattcgtcgaacacaccttttgcatacttccaatccacatcacaaagagccacaatattttcagtgccctttacgtgattaatattggcatgtcccataccaccaatacccacggctgcaagattcagtttgtcagtaggcgaaatatgcccgtggctcatacctaaaatagtactgggagcaatagtaatgccggctaaagcagcagcccccgttttgagaaactttctcctcgaaatgtttgacatgattttatttatttaagggttaataatctttggaaggttgccatgcaacaatccatatccatttttcatgtttcttcttcgctcgcgtatttgctccagagtgcgcaaattaccaatagcaggcaaatcgtgtttgcgtgtgtctttcaagaatgtccacgcatattcggatgcaatggccgaatcgcgcatggacggtaagcgggaactgcgctttccggtttctaccgaatcagcaaacaggtcgcacaatacgtctatattcttgccaccgaaaggcttctccacacgaatggtctgattgacaccgtgcagatcgacaacagcagtattgaagtcatgcgtcatacgcacaactccttttgtacctataatatccacatacgaattatgtgtctggtctttagataattgtccataaacaaaaccctgagtaatatcgaagactacgccattttggaaagttccgtgacattgtacccaccaaggatctttataattccacatattcactccctgagcattccatgttctataatcacagcctgcataccaacgggtaatatcgacatagtgcattccacaatcatggaaagccggcccctcatactcatgaccttcgcccggcgccaaaccgggagtcatgtggcaaatacggataatagccaattctccgatttctccttgctcgatatactctttcattagattatggtaccaggaattccgcagatacaagtttaccgcagaaatgaggttggcattttctgtcatttccacgaccttccactcattttccatggtatctgcaataggtttttctgaaataatgtgcttgccgtagcgaatagctttttctatttgttccatccgcgagtcggccaaagtgaaaagaccgactacctgtacactttcatcctcaaaaactttttgattatcttctactataagagattcaggagataacttcttagccaattgacgtgattccggatctgtatcgcaaatataagcaatattccatcgcccactttttgtcatcgcttcccaatagaatcttcccattctaccgaaaccgataattccaactttaattctcgtgtctactgaagattgcgtgttcataataaaacatagtgaatttaagtacaaataatagatgaagtatcaattttcaccatcaagctgatgagtaaaaaactgatattgcaaatctagccaaataaataacggcttatttgacttacactactttatgtagatattaaattagcattttaccctattaatcaaacacttagcacttcaagtatatccaaaaaatgtagatgatttggaaaggggggcaacagtaaaatgataattatgtctcttgagttgaactaattttcataatttcgttctcaaattcatctctgtcgacagcagctttatttctcatcttcgtacgataattataaaccgtacttgtagagcaccggaggaagttcgctatcttcccactatccgtaatacccaagcgtaataaagcataaatacgaagttccctatttaataaagcatccggttttaaaataatcttctcttcatctttcaataaagcattaaaatctgaaacaaaagtaggatacaaacctaaaaagaccttatcgaaacgggcatacagtgcactaagctcttcatcaataagcgcagacgacttcagcttcttaatcaactcgtcatagtacttattaatagctattttatacagcatattctggtatttctccattttgtggatataactaaagcacacatcgaaaaattcggctatataatattcctttatgccattaatttcatacaactgattattggtgtcattcaactggctgttcatattattcagtttattgttcagccgcagaagttcttcattactttgcgccaatgcctgctttattttcaacgttttcttcatctgaatatagataaaaacaacgagcagaatcaaaaggaaaaggataacgcttgtagaaataagaaaagtagtcagatgcgatcttgatttagcctgttccgcctgataggcagtgttgataatagaattaaatttatagatttcaattgcgcggaaatgaataccagaagaaattacatcatcaatagcggattgtgtaaacttaaaagcatcggctagattcttttcttcgtattgtatcaacgcaagagattgaagagaggcattttcacgcgttgcattccgtgtatcggcaatcgccgacaatatcagatattttttttcctcatcatatttcttctgatggtggcataacctggaatacgaatgagtaatcatggcataattaggcgttcccacctcctcaatatccaacaattctttaaaaatttccttcgattttaaggtatcacgccagatataataagaagcttgtgacatccggtaatcccaagaagtgtgatctatgagagcaaacagtgaatcctgataagcagattgttgctttccatacagattgttggcaacagaaatagaataatgcccccagaaactggaataagtttgataatagtttattaataaatctctgggaagttctgaagtctttatacttttcaaaataatctccgcttcacggaacctgccacacatcgaatataaaagactaagatgtaaagacgactggttggtgaaataaggtctattcaactgacgggaaatctcaatattgcgatcaacataatgaatagcggaatcaatatgaaattttttatattcgttatataaccgtagattgattctatattctccttcaagagtcaaaccaggacttttcaacatacattttatccggtttatccgatcctctttctctttaacaaagacatgcttttcatctatcactctacgcaaagaatccgtcaataatttcaactcatcattcgcataaagaacactgccaattcccaaagcaatcagcagaagcaaaaacctcttcttcagaaaacaacagttgaatttcataatagtaatagcaaagataacaaaaaaagcgattcatccattcagaacaaatcgctttttgtatatgaagtaaatttgctcttattcagcaactacctcgaaaggaatctctaccgaaacttccttgtgaagcttaacaatagccttatagctaccaacttctttcacagcgtcttttacaacgatgatctttctgtcaacttcatgacctagcttagacaaagcctcagcgatctggatgttaccaacagaaccgaagatagtaccggttgagctaactttagttgcaatagtcaaagaaacgccttccaacttagcagccatagcctcagcatctttcttgattttctcaagtttgtgagcgcgctgtttcagttcttcagccaacattttctttgcagaaggagaagcgatgacagcttttccagtcgggatcagataattacgaccgtatccggatttcacgtttacgatatcgttcttataacccaagtttactacgtcttctttcaatataatttccatacttttcctccttcttatttcatcatgtcagttacataaggcagcaatgccaagtgacgagctctcttcacagcctgcgcgatacgacgttggaacttcaaagaagtacctgtaatacgacgcggaaggatttttccttgttcattcaagaatttcttcaagaattcaggatctttgtagtcgatatacctaataccactctttttgaaacggcagtattttttcttcttaacatctactgacggcggagtcaaatatctgatttctgattgaacttgttgtgccatgattaatcctcctttttgtttgatttaacacttcttctttttgcagcgtattcagcagcatacttatccatcttgaaagtcaagaaacggattacgcgttcatcacgacggaaattaagttccagcttgtcaattacagtaggatctgcattgaactcaatcagttggtaaaaacctgtagacttcttctgaattgggtaagccaatttcttcagtccccagttttcttcattgataatctcagcaccttcagcttgaagaacgcctttgaatttttctaccgcttccttcatctgaacatcagacaaaacgggagttaaaatgaaaacggtttcgtattgattcatacttcgtttaattaaataaataaattatttgattttaaatgcgggtgcaaagttagacattttattttgaactacaaatatttaatctttttttgtatccgaagataggatttatccgggaagtgacttacctttgcaaagttgtttaaacaataatttcatgatagagcaatttaatttcgatatccggcttatattcgccatattaaatggcaaagtttccgcggcaatcaaccgtaagctgtaccgtaacttccgtcagaacgggctggaaatcagtccggaacaatggacggtactcatttttttgtgggaaaaagacggtgttacacaacaagagttgtgtaatgcaacttttaaagacaaacccagcatgacccgcttgatagacaatatggaacggcagcatctcgttgtgcgcatttccgacaaaaaagatcgccgtaccaatctgattcacctgactaaagacgggaaagaactggaagaaaaagcgcgtatcattgccggacagaccctgaaagaggctcttcacggtatcactctcgacgaattgagcattggacaggaggtactgaaaaaggtattctacaatacaaaagattaggtagaagaacttctcttcaaatcataaaatccactaaatcgtgcatttataatggaatttttatccaaataatttcgcccgttaaagaattatgctttaatttgtgactggaatattataatctattaaaatacacacgcatgaaaggcttattaaagaacttaggattgatattaatcttggccggagtagtcatcctgttgggttgttcatttacaggtaatgtaaataacaacgccattctgggtacttctgtagtacttgtagtactgggactcatttcttatattgttattaataagaagatcgctgattaatttcgcaaaaatcaataaaaaatcccggaaacgaatgtttccgggattttttatttgtagtcatctcaaatgcgattattaagattcaacttccggggtaatcagcttatagccttttccgtggatattgataatctcgatagaatcatcttctttcagatgcttacgtagtttcgtgatatacacgtccatactacgagcattgaaatagttatcgtcgatccagatcgttttcaaagcaaagtcacgttgcaaaatctcatttgcatgcgcacaaagcaatccgagcagttcagattctttggtagtcagtttagtctgtttgccttctgacgacagaatttgtttctgtgtatcgaaagtaaacttaccaatcttatagatattgctttctttgttcttctttccacgaacacgtctcaagattgcttcaattctgaacgtcaattcttccatactaaacggtttggtgatataatcatccgcaccgattttaaatccttccaggatatcttctttcagcgttttagcagtcaggaagataataggaatttcagcatttgctgcacggacatcctgtgccagtgtgaagccgtcttttttaggcatcattacgtcaaacacgcacaagtcatatttattcttcaagaaagccttataaccggcttctccatcaggatataactcagcagaataaccttttgcctgtagatattctcttaaaagcatgccaagattttcgtcatcctcgcataataaaatacgcagtttctcgtccatatcaattattttttaataaaggtaatgcaataataaatttagttcccacgttcaggtcgctttccgcccggatggttcccttatgatccaatataatttttctcacataagccaatcccagtccaaagcccttcacatcgtgcagattacccgtatgtacacgatagaacttttcaaatatcttttttaggttctcctttttgataccgataccgttatcctgtatcgaaatcatcagtttacccgactcattccacgttctcactttcagttccagatcctcttccggtttcttatatttcaccgcgttatccatcagattaaagattacattcgtgatatgcatctcatctgcaaatataacaggatcggtggcctcaaggttcgatgttatcttaccattataccgttccactttcagcgcaaaggtattgacaactcctgaaattaattcattcgcatcaatctccttcatcttcaaagttgccttctgacgttcgaacatcgacatctggagcaccttttccacctggaagcgcaagcgcttggtttcatcatttatcactcccgatatatgctggaacatctgcggtgattttcctaccgcgggatctttcaacatctgcgctgccaatgaaatggtagatatcggtgttttaaattcgtgcgtcatattattgataaagtcattcttcatttccgtcagtttcttctgccggaatacgatataaatcgtaaagatgaatgtcactaacaataccagcgtaaatatcaacgacggaatcatgaaactgattgagtcaaagatataatctttcttaccaggaaagtgcactttcaatatgctcatttttgcaggcggatcattcttgaacaatgcctgctgataagcgtcctcacttccctttgcctcataatccgcacaacgatagacttccctgccgtctttgtcaatcactgtaaagtgataaggcaagtctatactattattatataagctcgatttcagatagtcatccagttctttgaaccgtactctgtctccaatcgatttgtcacttccccgataaatcatctgccaggccacttcatcgagtaacgcccgttgatacatataccgattcttgatggcttccactaatgaacgcgaagtttccggaatagtctttgttcccctgtaaggagaaatcatagcctttggaagctcggagggcttggtggtcatcactttcagctcaaaatccgaatatacctttccatccttagacttcaccgtgaaccgttgcgtttgctgaatcaagttgtcttgttgtatggaagcgttattcgcaatcagtgcttttctttccgcttctgaaatatcttcgatcaaccaacgtctggtctctgcatattccacatccttggaaacctgatccaggctattgcgtacagccgaatcaaactgttccttacgggttttcatcatttcctcgatataactaacctgcaaatacagcaggctaaggaaggaaagccccattacaatacctaatatccaaattgttgacttcttcatagcaacaaaattaacactccctaattaacactcctaatgcattaacttgatttaaccggaacttcccggaaattaaccgtaaggagctatttaggttgtattctgattactacaacaacaaaacccctcctttggtttgcaaatttaataaaaaattaaatcttttccttgcgtttttctatctttattaatcatagttaaacaaaaactgtccccttttacttaaaaaagggaacagttttaacgtttaagttgatagtttataaccaacagatagtaaatagcgaattttcaatcaactatcacatatcatttatcaactatcatttatctttattcttctacttgcttagcctcaaagtctttcatcaacttatcctgaacatctgccggaacaagctcataactagagaacttcataataaacgaagcacgtccgccggtgagtgagctaagagctgtagagtaggacgacatttctttcaaaggaactttagcaaccagtttctcaaaacctttttcgctactcatacccataatcatggcacgacgtccctgaagatctcccatcacatctcccatcctatcagacggaacaaacacttccacatcataaatcggttccagaattttcggaccggcgttcttgaaggcttcactaaaggcattacgtccggcaagcataaaggagatttcattagaatctaccgggtgcatcttaccatcgtaaacaatgacacgcacgtcacgagcatacgaacccgtcaacggaccttgctccatacgagacataatacctttcataatagcaggcaggaagcgcgcatcgatagaaccaccgacgatactgttgataaacaccagtttaccaccccattccaatggtatttcttccgtacctctcacggtaatcttaaattcctgtccattgaacttatacgtatcgggcacaggcataccttctttataaggttctacaatcaggtgaacttcaccaaactgaccggcaccaccggattgtttcttatgacgataatcggcgcgagcggcttttgtaatcgtttcacgatacggaatcttcggttcttcgtacttcaccggcagtttttcgttattttccaaacgccatttcaatgtacgaagatggaattctccctgtccgtgtaccaaagtctgtttcaactcctttgactgttcgatcacccaggtaggatcttcctcacgcatacggttcagaatactcatcatcttttccacatccgcttcattcactggcttgatagcacgggtatatttagaattcggatattagataaagttgaatttatagtcgcaatccttaccgttcagcgtattaccggttttcacatctttcagtttcacagcagcaccgatatcaccggcttgcagttcttccaccttgacgcggttaccaccggctaccacataaatctgcgcaatacgttctttcgaaccacggtcggcattcagcaaatcgtctccttcatgaactttaccgctcatcactttgaaataggaaacttcaccgatatgcggctccacgctggtcttgaagaaataaagggattccggtccgttagtatccggagccacttctttaccttcggtattctgtaccttcggcatttcagaaacaaaaggaacaacgttacccaagaattccatcaagcggcgaacgcccatatccttacctccacaaacgcagaatacggggaacatacctctggcgatcaatcccttacggataccttcgcgcatttcatcttctgtaagagaatcttgttcgaagaatttctccatcagattttcatcattctcggcagcagcttctaccaatgctttgtgcatctccatagccttatccatttcttctgccggaatatcttcgatagtcggagcccctccttcgggtttccacgaatatttcttcatcaacagcacgtcaatcagtgcattaaagcccggaccggtagctattggatattggataggaacaaccttagagccataagcttctttcaactgttcgaggatattatcataatcgcatttttcattatcaagctggttgactagaaaaataacaggtttattcagcttttctgtataacggaagtgattttgtgtaccgacttcgacgccgtattggccattaagaagaatgattgctgtgtcggtcacatttagtgcagttactgtactgcctacgaagtcgtccgatcccggacagtcaataatattaagttttttgttattccattctacatggagaacggtggagaaaacggagtaaccatactcttgttcaacagggaaataatcgctaacagtgttttttgcggcaacagatccgcgacgttttataacaccactctcgaaaagcatcgcttccacgagagtggttttcccagagccagaacttcccaacaaggcaatgttcttgatttcattagtctgatatactttcataatatataagattttagtaattactcagtatgtttctcacataccattaattttgtgatgcgcaaattagggattaattgggggaaaagcaacacttatggcagtgttactaaacaatgttatgtaacacatctttaacatgaacattttcgaatcgggttaaaaattattttcgcatggctataaactaatttcatagttgcaatgagtaatccggcacgatgttatttttagttgttttcctttcatacaatagttcccccgttacctaatcagttttcgtttgacagttgtcaagcgatagaatgacaattgttgaactgtcgcttgacaactgtcaaacgaaaacccggctacaagttcgaatcttatttataaaagaaaagatcttaaattcagcattgcaggaaattatcttctactaatcgatgggagaattatctatttagcgtattcctgccccactataaataatttccgtcaacagcttttttgatatatctaataatagtcttacttttacacccacaaacccaaacagcatagctatggcaggtatctatcttcatattcctttttgcaaaacgcgctgcatctactgcgacttctactcaaccactcgcagcgaactcaaaacccgttatgtacaggctctctgccgggagttggcgatgcgtaaagaatacctgaaaggagaaaatatagaaactgtttatttcggtggcggaaccccgtctcaactggaaaaagaagatttcgaactgatatttgatactatccgggagcattacggattaaatcattgccaggaaatcacgctggaagctaatccggatgatttatcacaggaatatctggaaatgctttcctcacttcctttcaaccgccttagcatgggaatacagacttttgatgacgctacgctcaaactattgagacgccgccacaatgcccgtacagccatcgaagcaattgacagatgccgaaaagccgatttccaaaacatcagtatcgacctaatttatggattgcccggagaaacaaaagaacgatgggaaaacgatctccgccaggctatcagtctgaatgtagaacatatctccgcctatcacttgatttatgaggaagatacacctatatataatatgttaaaacagcatcagatatccgaggtagacgaagactccagtttagaatttttcacattgctgatagagcatttgcagaaagcagaatttgaacactatgagatttccaatttctgccgccccggaaaatattcccgccacaacacttcctattggaaaggaataccttatctgggatgcggaccgtcggcacattcttttgacgggatgacacgggaatggaatgtttcttccatcgatacatatataaaaggtatagaggaaaacagccgtgctttcgaaatagagtatctggatcagacgacccgctacaatgaatttattatcactaccatacgtactgtatggggaacgcctatagaaaagctgaaacagatgttcggcaatgaaatgtgggagtattgccagagaatggctgcgccttatctgaaaaatgggaaactggaagaacacgatggagccttacgcttgactcgtgaaggtattttcatctccgacagtataatgagtgatttactttgggtagattaacaaaacaaacagcaagccgatgaccgaatcagaagtaagaaagttattgcggcaaatgaaagaactggattcgcaaactgctttccgggacttttacaacatgacttacgatcgcctcttccgcatagcctactactacgtgaagcaggaagaatggtcgcaggaaatcgttctcgacgtatttctgaaactatggaaacaacgtagcaatttacttgatgtgagaaacattgaagattattgtttcattctcgtcaagaatgcttcgctcaattatctggaaaaagaatcaaaacacacttacattcatcctgattctctgcctgagccacaggaacagaactattcaccggaagaatcactcattagtgaagaattatttgctctttacgtaaaggcactcgaccggcttccggaacgttgcagagaagtattcattcgcatccgcgaagaaaaacaaagttatgcacaagtagcggaagaattaggtatcagcatgaatacagtggatgcacaacttcagaaagcaatcacacgactcaaagaaatgattagccgggcagaaatagattaacaattatttagaaaaagagcgtagggagtttctgtcaccctccggtctttatcaacaaataaatcaatcactaaaaaagacagaaaaatgaaaaagctaaatgacgcaaacattggaatccttgttcttctatcaacttgcctgtgcctgttctcatgcaacaatgacaacgacaatttgcccaaagactatgcaggattcgaacattcgaaggaaacagtagaatgtgaaggaaacaaatcagagtgtgaattggaaattaaaattgtggcgatggagaaagcgaaagaagaccggacggtagtacttgccgcacctcctccggtaacagggcaagcagcagtcatacaactgacggaaaagaaagtaatcatcaaagcgggtaagaagtcggctacgactatcattaaaatctatcccaaacagatggtattgaataaacagaatgtcactttatcctgcactccccaatggaaagaaggaggaatcagcaaactgaccattctgttgaaacgaaaataatggatcaagagtaatacagaaaaaatatgaaacacaccgatacggaattagaagaaatactgaatcagctcattgcttccacgcgttcaccgcgagggcgtttttcagcagcagccagttacccggaactagaaaaaagactgaagtcgcatacccggcatctgactttgatacgcaccttctcggcagcagcggcagtagctctactttgcctatcggtatggacagcttatttatatatgcaacctgctgcaatacaaacgatttccactctggcagagacacgtactgtccgcctccctgatggtagttccgtcatgctcaaccattattcttcgctttcttatccggaaaagttccaatcggacaaacgggaagtggagctaaatggagaagcctattttgaagtaagcaaggacccaaaacatccgtttatcgtgcagactgaaacgattgacgttcaggtgctgggaacccatttcaatgtagatgcatatcatgacaatctggatgtaaagacaacgttattgtccggctcggtagcagtcagcaataaaagtaaatctgttcgtatggttttgaagcctaacgagattgctatatataataaggtagaagaaaaactcacccgcaaggttttagagaatgcagaagatgaaatttcctggcgacaaggagagtttatattcgacgacctgcctttacaggagattgcccgcgaactgtccaactcattcggagcgacgatccaaatagccgatacaactttgcaaaattaccggatcacagcacgattccgcgatggagaagatctggcaactattttatctgtattacataatgccggttatttcaactactcacaaaacaataaacagattattatcactgctaaaccagactaagatgaatataatattccaaggtcgcttccctgtcagaaccattgttctgataggggtggcactccttatcactactcaaatatatgcacaaaatgcggaagcccggctttcgctgacactacgaaacgccacactaaaagaattcgtcaagcggattgaaaactcaaccggatattcttttatctatggcgaggaaattatcatcaaacataaaatcaatttgcaggtaaagaataagccattgcgtgaaatacttgacctcgtattcaagaatgagcagatcagttatcagttcaccggccgccatattctactgcaaaagaaaaaagaatcaaaaaccgtaggccgtaagttcactatcagcggatatgtcacggatggaacgtcttccgagacgttgattggaaccaatatcattgagagtcatcagaatcaaggaacaaccaccaatccttacggtttttacagcatcactttgcccgaaggagaaaccgaactgcgtttctcctatctgggttatgccacagaagcgcatcattttacgctctcacaagatacattgctgaatatccgtatgcagggaaacacgcagttgcaagaggtagtgatcgtttccgataaaactgaaacgggcaccgtagctacccagatgggctctatcgaaattccgatgacacagattaaaaatacgccgagcatactgggagaagcagatgtcatgaaagccatccagctgatgcctggcgtacaggcaggagtagacggttcagccggactgtatatacgcggcggcagtccggaccagaatcttattctactggatggaactcctgtatacaacgtagaccacatgttcggattcttttcggtttttactccggaggccgtcaaaaaggtaacactattcaaaagctcctttccggcacgtttcggcggacgtctttcttccgtcattgatgtccgcaccaatgacggagacatgcagaaataccacggtacgcttagtatcggattactaaccagcaaaatcaatctggaaggcccgattgtgaaaggaaaaacctctttcaacatttccgccagacgttcgtatgtcgatctcatcgccaagccatttatgccgaatgatgaagaatatggttattacttttatgacatcaatgccaaaatcaatcataaattctccgaccggagccgtatctatctaagcgtttacaatggaaaagatcattttgccgccaattatgatggagataccgactccaaggatggaagcacaatgaattggggaaataccattgtttccgccagatggaactatatattcaacaaccgtctgttcagcaacacaaccgtctcttacaacaactatttattcgacgtcaactcatacaacaacaataaatatgccaacagcatgggagcttcgataatcaaccgatattcagccgattatcgttcgggaatcaatgactggagctatcagatcgatttcgattataacccgtctcccgcacaccacattaaatttggtacaggatatatctatcatcggttccgtccggaggtcatgacatccaaaatctccgaaaaaacaggagacaaagtagatcgcgacaccacttaccacagcatcgccaacagccggatttacggacatgagctatcggcttacctggaagacaacatcaaggtgaatgaccgtctacgtctgaatctcggattacacttctccttgtttcaggtacagaagcagagttattcttctttgcagccacgagtttccgcccgttatcaactagggaaagacgtaactctgaaagcctcttatacacaaatgagccaatacgtacatctgttatcatccatgccaatcgcaatgcctacggacttatgggttcccgtgactaaaaaaatcaaaccgatgcgctctcaccaatattcattaggcggatactatacgggaatcgagggatgggaattctcggtagaaggctattataaagatatgtataatgtattggagtataaggaaggagtcagcttcttcggttcttctgccggttgggaaaataaagtggaaatgggcaagggacgttcggcaggtattgagtttatggcacagaagacacttggaagaacgacgggatggctgtcctacactttgtccaaaagtgatcgtcagtttgccaaaggcggtatcaacaacggtgaacggtttccatataaatatgaccgaagacacaatatcaacctgacaatcaaccataagttcagcgaacgtatcgacatcggtgcttcctgggtgttttatacaggtggaacaagtacaatccctgaagagaaaaccgctgtcatccgtcctagcgatggcacaaacaacggatttggaggaggatatggatatggagattattttgattcaggcataacttcacccaccatcggagaagcttcgtatgtggagcatcgtaataattaccggttaccagccagtcaccggttgaatgtgggagtcaatttcaacaaaaagaccaaacatggtatgcgtacctggaatatcagtctgtataatgcatataatgcgatgaatcctaccttcgtatatcgcagcaccagcaaaaacgatccctacaaaccgattatcaagaagtatactatacttccattaattccatcattcacttacacttataaattctaaacccattatgagaactcgtatatattatccatttatcctgttaatagcattactgacaacagtatcttgcgaaaacgaactcccgtttagtgtaaaggacaatccccccaaactagtgatgaacgcactaatcaacgcagatagtctgaccaatgttctttacctcaatttcacgggaagaggatatgccactcatgcagaaaaagccaccgtggaagtacgtgttaacggacagttgtcagaaagtttacgtccgctcccaccccaggcggaaggagatatgcaatgccgcttcaacatttccggcaagttctctcccggagatgtagtacgtatcgacgctctcactgacgacgggcagtatcacgcatgggctgaagttaccgttccacagcgtcccaacgaaataactgatatcgatacggtcactgttccactgacacagtattattatacacagaattatctccgatataaaatcaacatcaaagatcgccccaacgaaaataacttctatcgacttatcatggataagcaaatgacagtgaaagactataataatgaaataggcgaatatgtcactcaaaccacacaccgttatcattttatatctcgcgaagatgttgtgttgacggacggacagcctaccaacagcgatgacgaagataatggcatgttcgacactgtaaagaatatatatggggtgtttgacgactcacgattcaaaaatacatcttataccatgacagtttacaaccagacaaatgttgaggggctttccaaatatggaacgaatgtaaagatggatattattgtgcgtctgttaagcattacagaaaccgaatattactatctgaaagcactcaacctggcagattccgacgcttatgatgagacaataaacgaaccaatcaaatatcccggcaatgtgcacggaggggtcgggattgtcgggatcagtacggagacaagcaaaatcattcatatagaaaagccatggatatgaaaactcatcacctactatttatactcatcgcattaccgctgttctgttcctgccgaagcagccggagtatgctaagggagatacaagccttaaaatccagcttgtattacgagctcacttctcctatctatcaggagaaagcagatcaaaccgtatatctggacttcatcgactactccaacatggattattacaccagtgtgaaacgaaaaaagtctgcatatattccgctactgctatataactatgagggtgagcttttccatcttcggttaggagagtcttctctcacccaactctatcgggaatttctgacggaggcactgcttaccgaatgtaacagtagcacctgctgtcatctgatagataatcagaaaggaaaaatgattcccgattccgcctatcggctggaagtaaaaatcagaaagaatgagacgtgtgccagaatcaaactcaaccagtcaagtatcccttggtttgagggagaaatgttggaggttgtcaataacaaaattcgcccggcagcttccagtcttgccatttctatccgcctcactcaaaaggaagattgcctgcttgataaaacctactctacagaatatcagcaaactaccaaagcgcaaagattcgaagattcaccgtccgccaatgccgcttgcctggatgatatgaccgaatgtttgtcaatggctacgaaagaaatcgtggaggagattagtcgggatatacatttaatactatctttgcagccaaaaagcagacactaactatgtttatcattattggaattatgctgacaggcatgcttcttggctacttgttacgcagtaaaagactatcatggatacacaagataataactcttcttatatggattctcctctttcttctcggaatagatgtaggaggtaacgaatctattatcaaaggtttgcatactctcggactggaagctattatcatcactgtagctgccgttgcaggaagtacgttatgtgcctggggattatggtacctattatatagatggaatagaggaaaggagacaaaagcatgaaaggtagtttgattatcgtctctttcttcattatcggtactctttgtggagtttatcatcttattccatacgacttcaccgacagcaagctcagttactatgccctctgcggactcatgttctgcgtaggcatcagtatcggcaacgatccgaatactttgaagagttttcgctccctgaatccgcggcttgtattcctccccatcatgacgatcattggcacattagcaggctgcgccgtagcaggagcctttatgagccaacgaggtcctttagactgtatggcagtcggagccggatttggctattattcactttccagcattttcattaccgaatacaaaggtcccgaattgggaactattgcgttactttccaatatcatgcgtgaaatcattgctttgctgtgtgcgccattattagtgaagtatttcggaaagctagcccctatttctgttggtggagccactacaatggataccactcttcctattattacccgatattcgggaaaagaatttgtaatcatttccattttccatggttttgttgttgatttcagtgttcctttcctagtcacgttcctttgctcaatatcattttaacaggaataaatcctaaaaagcagattattttcaccatcgttttcgcacacatattacaaatatgtttcataaagaaccgtttttgtatcaaaaagcacatcatctcttgacttacatcaagaaatgaggctaaatagaatcttttccttttctttatttttatgctataaaacatattcttatatttgcataggtaaaaagaaaaaactaagcgcttagactaattttcaataggtattagatttgtttttaggaatagtttttaggtataacaattaaaaaagtaggtattatgaaacgtttaggattaacattagtggcagcgctctgccttgctgctacaacatttgcagccggaaatcaacctacaactgcaaaatgggaaggtaacatcaatgttagtaaattaggtaaatatttgaacttgaattcagttcagagtgaagaggttgcaaacatctgcgattatttctccgaacagatgtcaagagccacaacagcaaagaaagataaagaagctaaattgcgtaacgctgtttatggtaacttgaagctgatgagaaagactcttagtgctgaacagtatgccaagtatgccgcattgatgaacatcactttacagaataaaggtattgaactgaataagtaaaatgagtaatatgcaaaagagagagagggtggaagccagtttgggcttccactttttttatcccattatttaatagtcaccatcgtagctccaaatccatattcctggaaagaagcatcctgataacggcaattactatatttccgtttcaattcatcaacgatagctttccgaagcacaccatctcctttgccgtgaataaagacaatcttctgctcacgtttgttcttatagacttccatcacttcgcgaaacttatccaattgatagttcagtatttcagcattacccattccttgagtatcatccagtagagagtcgatatgaagatctatttcaacaatctcactctttccaccatgagcatgattcggtttcacaataggttgtgatctgggcttatctacagatttcttctgcagcaaagcctcttgaagttcttctgccgaaacatatacttgcttggtaggcatatcatctttcacaatgtcataaatcaacgccggttcttcgaagaaatcagaatcgctaaaggtatgaagtttatagaacttcacggtatcaatccgtatttccacactgacagccggtttgatagccgcaggcttaccatctttgaaagcaatcaactgaacggccacccgctccatatcattcagtacatcttttgtaaactcctctaacagcaatttcgtattaggttccaccaacccgtgcgaacggttcttccaggcttttccttctgcactcaaataagtgtaatacaaataataattgctatcatttaccaaataagtctcgaaaggagtagtcatcatagcctttgcatcttcaggcacataagccagaaatacattcagcgtatctccccccttcacttccggctggcgttgaatgacgggcatctccggttttaccggtttagcaggtccctcttgtttcggagcagaagaagtcggtttacgcttcaaattatagtcatccgtttcaatcactacacactcacgtatcggcatcggaatatcaaatccatctgcatcttctaccaacacaaaatcctttccctggaatccagttacgattccaccgcctacctcactaagaaagcgtactttatctcctattttcattattgtatatccaattaaaattcaaactcaaaaaaacgagtaacaaagatagagatttctatgaaattaaatggagattcggttctaaaaacaaaccgtctgcctttattcctctttttattgtaactttgcatacgaaataccaaacagatgatctaaaattcaccattaacgacgaaaaccaatgaaagaacttattaaaatcattgcttttgatgcagacgataccttgtggagcaatgaaccttttttccaggaaatagagaaacaatatacagacctattaaagccttatggcacttctgaagatatttcagccgctttatttcaaacagaaatgaataatctgaaatatctcggctatggagccaaagccttcaccatttctatggtagagacagctttgcatgtgagtggacaaaagatttcaggtacagacatccaacatattattgaattaggcaaatcattactgaaaatgccaattgaactattgccgggagtaaaagaaacgcttaaagtattgaaagagaaaggtaaatacaaattagtagttgccactaaaggagacttactcgatcaggagaataagctggaacgttccggattagcctcttatttcgatcacattgaagtgatgtccgataaaacagagaaagaatatcaacgaatgttgaatatcttacagattgctccttccgaatttgtcatgattggcaattctctgaaatcggacattcaacctgttctatcgctgggaggatatggtatacatattccttttgaagtgatatggaaacacgaagtagtagacacattcacacatgaccatctgaaacaggtgaaaagatttgatgagttgctgcttttgttttaaataagttctgttctttcttcagataagctttaaatctgaagaaagaaatcagtgaacaatgccatcttattggattacaaatccaacagtttcatcaattcagcagcccgacacgcttctatcgaattaccgacagagagtttctccaaaatattctgccggtgtcgattgactgtattcacactaatataaagggcagctgcaatttctttactagatagtcctttacgtatacagcgaagtatttctttttcgcgctcggataagatattgcgatgttcttccgaaaaaaagagcgtttcgacctctccacgttccatatgggtaatagtgggatatatcccctgctccgttcgttgatctgcagacaaggtataaagacaaaaaatcaaccatacacttccggaaggagtattttccataatctgcactaaattatcaatatactgatagactcctttctcattcatcatacgtattctgcatcttccccggtacttcaaccgttcttcggaagacatcgaaaaggtcttctgaaaaaactgatactccaataaccgcttttctaccaagtcttcaggatgaatacgccgataaatacaatcttcatccatagaatcaatcacactcaaagcagcttcttcgggagttaagcctagaaaatgcgcccaaggatgaacggcaatgtaacttttcctattcgaaagatctgaaataacagcacatccaccattaatctccgtcaatgaatgaataaagcgttgatgttgctctacaactccattgtccaatatttcatcggctatcagttgtgtcgcataaacttcatctatttccttttgtaatacatccatcttataaaatggttattattcagtattgttgcacacggaggtatgagctatctttgcaccacaaagataatcaaataagaaatgatcatgaaacatttaaaaatcaaaatcatgtcaatagcctttatggcagtagcaacttcttctatggcacaaagtttgaataagatgaactggctgaacgagcctcaacagtgggaaataaaagatggcaaaaccttagtgatggatgttcctgcaaaaacagacttttggaggatttctcattatggattcacagtggacgacggacctttctattatgcgacttatggtggagaatttgaagccaaagtaaagataaccggcaactatgtcaccacctttgaccaaatgggattaatgctgcgcatcgaccatgagaactggataaaagcaggtgtggaatacgttgatggcaaacagaatgtaagtgccgtggttacgcatcggactagtgactggagtgtagtacaattgccggatgctccccgctctatatggataaaagcagtccgtcgcctggatgcagtagaaatatttttctcacgtgatgataaagaatatattatgatgcgcacttgttggttacaagataattgtcctgtcatggtaggattaatgggagcttgtccggacgggaaagggttcaccgctacattcgaagaatttaaagtgactccattagccgatcaacgaagactggaatgggcaaaaaggcaaataaacaaataaaaatcagtcctgatgctatttatttaaatagagagaaagctctttataatataaatatggtagtatatcttactttaaatgttctatttttaatatgatgagtataaatagcatcacacggatttcctcttccagcagttctgttgtataaaataatgcaagaatatacagtttcagaggagttttttacataaaaacagtcaaaagatacactataaataaacttattgacaatcgtttctttaaaaggaataaccagttccttttaaaggaacgactcattgatcggtgagaaacactttattcctttaaaaggagcatataaaactttattttaagtgctatcccagagctaacctacacctgaaacagccaacactccacatatcaatttgagacaaaacaaaggtaagttctatacatctattccataaaagacacagactaaaacaaattattccaaaacgcaatcgatttatttcttttctaaattcgaaaacagcaaatccttctcattttcaactcatacctaaatatatcctgcatatatggaattatgcaacgataaaatatatgttttctcatattatcgccaaaaccgtatatacttatctttctcacgatccaacgcaccttcatcgacacaatcatccaaccggaaccatgaatgttctatcaatgagcctctctttttaacagacttatcccagtttcctatcacttgtccttcatgaagaacaatcggataaaacagaccattattggtaaatgctttcgagtaatgctctttaggcaaaacgtctgtccggtctttataaccaagcaaatattcatcataagaaggaagaagatgtaaactgccggtaacttttccacgagtccggcaatcttcatgaatataccatgtttgtccattccattcttctgccgttaattccgaatcaatcaaataaatagcttgacgtgcatctgtaataggcagccccgaccaccagacaaaatcttgcaaaacagcaggagcatgactacgaaaatagcttctagccaaacgagccaaagattcatctttggtcaattccggcatcggcggaacactttcttccaaaagcgcatacgtacatttactttctttatcttccccactacatacaatccccacctgctccgcacgagccataaagcgggtcatacgatgattatccgctacaatccccgaacggttaaaatgctcggcaatctcctgcctcgtcaagcttttcttcccacaaagaattttctccaacagattatgacttttcgtatagagttcttcagaaatttccaagtcatgccctttcgcataagactcattagcagatataatacgcccggcggaaagtttcaacatccaccggatatcttctgctgctacgagatgccatgtcggacgcattacatgagtccgcaggatttcaccatcacgcagtgctttttccacagtttgaatcgttgctgacttcaaacgcattcctactgcccatttcaccatggaataattctgtgcctgcatagctcccatccaggacacaagttccttgggttgagagaaaagaggacttaataactgttggttgagtaaacgtatattcggtattttcattttaatttattgccatttttatcaatataaaaccaatcatcactttgccaggtccaatgctccccataatcatccaatgcctttttttccccagtataggtcacttcggccttaccatccttgaaagggcaaacgaaagcaaactgtggtttgatgacaacattccccagtgtatcggcaaaccccatcagcatctcatcatttatgatacgaaaaagcccttcctctacataatccggtccattatcaaaactaaaggcataaaaaagtttttctcctttgttattaatagttgtccatccgggtttatgaggttccattacaaaaccgatatgccgtattgtatcacttcctccataatgatatttaccaaagggaacaatcgtatcaccttgctcattcaaataacagacagaagatcctaattccggatattcagttgacatataagcaataaggattgaatgatccgactgtttttgaccgtccaaacaaccagtcataaaaatgcaaaacaataaggcatacaaagattttagtttcatgagcttattattagtatattgcaaatataaaatttctttccatacaaatcattgttaatgataaaaagaataaataagaagatacagatattgcctcaactccttagccaagagtcaaaaccagttggaagtctccgaataaatctctacttttgtactccataacaaagaatagatcaagaaatgatgctctataaactcatccctccttcagtagtaacagcaactatccagttgccggcttctaaaagtatcagtaatcgtgcattaatcatcaatgcgctgggcaaaggtatttatcctcctgaaaacctgtccgattgcgacgatacacaggtgatgataaaagctctcaccgaagggaaagagacgattgacattatggctgcgggcactgctatgcgtttccttaccgcctatttaagtgtgactccgggggaacggacaatcacaggaacagcccgtatgcagcaacgcccgatacagatattagtcaatgcgctccgggaattaggagctgaaatagagtatgtccaccatgaaggatatcctcccttatgtatcaaaggggcagagttgaaaggaaatgaaataaccttgaaaggaaatgtaagttcccaatatatatctgctctattgatgataggtccggcactcaaagacggtttgactttgcatttaagcggagagattatttcccgcccttatatcaatcttacattgcaactgatgcaggactttggagccaaagccgcatggacttctcccaatagcatatccgttgctccacaactttatcagagcattcctttcaaagtggaaagtgactggagcgcagcttcctattggtatcagattgccgccttatctcccaaagcagaaattgaattattggggttgtttcataacagttatcagggagatagccggggagcagaagttttctcacgcttaggtataactaccgaatttacatcgcaaggtgtgaaactgaaaaaaacaggcaaagcgccggaaaggctggaagaggactttgtcgatattccggacttggcacagacgtttgtcgttacttgtgccttgctgaatatccctttccgtttcaccggattacaaagcctgaaaataaaagagactgaccgtattgccgctctgcgagccgagcttaaaaagctgggatatgtgatcgaggaagaaaatgacagtatattaatgtggaatggcgaacgatgtgaaccggaagaaactccggtgattgaaacctatgaagaccatcggatggcaatggcatttgcaccggcaattatccgccatcccaatttacttattgccgatccgcaagtcgttaccaaatcatatcccggatattgggaagatttgaaacaggccggatttcaggttataaacgaaggctaattttcatacgctgtggaagatttcaacaaatatacttcccacatcaactactcccctattgtagattttgtattgcaacaggggaagcagacctattataagaaaggagactacttttcccgccaaggagaagtatgcaaaacaatgggattcgtcagttccggttctttccggtactgttgcaccaacagtgtaggcgagagcagcattgtaggctatactttcgatcattcttttgttggcaactatccggcttttcagttacaggataaatcaaatgtagatatacaagccttgtgtgactgctcggtatacgtaatcaattatcagcaaatggcagacttctacgataccaacgacgctcaccaaaagttaggacgtcgcatcgcagaaacgttattgtgggaagtctacgaccggatgatttcaatgtacagcctgacaccggaagaacgctatcttgaaattatcaaccgttgtcccgacttactgaaactgataactttaaaagaactggcttcctatcttctgattcgtcccgaaacattaagtcgtatccgaagaaaagtcgtacaaaaataaattcttgatttcaatcaagagtttatttattctctacccttacttttgcgggcaaacaaagtatattgtatttcatgaaaaaaattataattataggtgcaacttccggcatcggtcgcggattggcagaagtctattctcaagaagattatcttatcggcattaccggtcgcagggaaaatctattagaagaggtatgcgcccgggacaaagacaaactattctatcaagtgtgcgacatcaccgatacacaagctaccatttcatccctcgaaactctcactcaaaaaatgggtggaatggatatattgattatctgtgccgggaccggagaactaaaccccgaactctcctaccaattggaagaacctaccttactaacgaacgtgataggattcaccaacatcgcagactggggtttccgatatttcgaacagcaaaaaagcgggcatctggttactatttcctctgttggaggtacacgcggcagtggcatcgctcccgcctacaatgcgtcgaaagcctatcaaatcaactatatggaaggattacgacaaaaagcaactaaatctccttattctatttacactaccgatattcgtcccggatttgtagacaccgctatggcaaaaggagaaggattgttttgggttactcccgttgataaagctgtgaaacaaattaaaaaggctatttctaaaaagaaaaaagtagctttcatttcccaaagatggagatatgtaactatcctgtttcgtctgttgccatctgctatttattgccggatgtaatgatagatactccatagccaacacatatttgtctaagtaaatctaataaaaaaacacctgccccaactgtttatacagatattggtatctaccaaattctagttatgtatataagtctgtacgggaatcatattaatgataatagctaactcacaaataaacagctctcttacaattggaggacacttttagggttcagtaatcaatgatgaaaaaataagttctttcagaactaggatggtttataaaattagaattaacggcacaaatatataatatattttaatacatagcatgtattttcaaaaataatatcaaattctcattcattttttctttttaagaatacccaaagccgtattttatcttcatattgaaatgaaacgacttgtttatttcatcatccttgttatttcatctaacacaaacaggtacgaaatagatataaaatgggtataaaacaagtagaaaagatcgcttaaaagatgactctttttttgaatttaaggctttgaatccaacgttttacgcacggaataagttctgaaagaacttattaaaagtaattccggattctaggaaaaactctaaattcaatgctatgttaaaacaactaaagtcagttagtatgttgttgttcctactgacaatgtcagtagaagcagcttatccggaaataggtgaaagcactctaaaagtttccgttgtacaacagggtactacttgtaagggtgtagtaaaagatgcagcaggtgaaaccatcatcggtgcatccgtcgtagccaaaggtacgacgaacggtacaatcaccggaatcaacggtgacttctctttaaacaatgtaaaaaccggagatattattgtagtctcttttgttggttatcagactcaagaaatcaaattcacaggacaatcattgaatatcatccttaaagacaatacacaaacattggatgaagttgttgtggttgcttttggtacacaaaagaaagtgaatgtaacaggatctgtatctacggtaggagcaaaagaaatttcggcacgtcccgttaactctaccatagaagctttgcaaggtatggttccggggatgaatatctctactggtgatggtggtggctccttaggttcagacaaaaaattcaatattcgtggtgttggaacaattggagctggttcaaaggtagaaccattggtgctcattgacggtatggagggagacatgaacgctatcaatccacaggacattgagaatatttctgtactgaaagatgcagccgcttcctccatttatggctcgcgggcaccaggtggagtcatcctgattacaacaaagaaaggtaagtcgggaaaaacggtagttaactataataacaacttccgttttgtatctcccttgaatatgcctgaaatggcagattcatacaattttgctctggcagtcaatgaccagttaactaatggtggacagactcccatgtatagcgccaccaaacttcaacaaattctggattttcaagcaggaaaaagcacacaatatatgtggccgaccgatgcgggaagatggaattcattcgatgatccccaacggcaagacgtgatgcctaccggcaataccgactggttaaaaacgttatttggtaatagctttacccacgagcattcattgagcgtaaatggtggaacggataaaatacaatattatctttctgcgaattatctggaccaaggaggtctcttgaagtttggagatgataacaaacaacgctactcctttactgcaaaaatcaatgcggacttaaccaaatggttgaaaataagttatagtatgcgttttaaccggacggattatgaagctccttcatttgccggaggcgatatcaaaagtaatgtattctatttcgatgtatgtcgctactggcctgtcattccggtagtagacccaaacggattctatactgtcgaatccaagatttaccaattaacagaaggaggccgatataaatcacaaaaagacgtgatggcacaccagcttgctttcatcgtggaacccatcaaagactggaaaattaacgtagaattgaactaccgttccaactataatttcgaccataccgattatcaaaccgtttatggttatgatgtgagtaaaaatccctacattattgccaatcaaacttccagcgttacagaatatgcttataagagtaatttcttcaatccgaacatctttaccgaatacggcaaatcattagaaagcgggcacaactttaaagtgatgctgggttttcagagcgaactattcaaacaacgtgatattaccgcttcccaagacggtatcatgtcggaagtggctaccttgaacaccacgcagacaaatgcacaaaacagaggagggtactccgaatgggctacagccggcttcttcggacgtgttaattacgactacaaaggacgttatctggctgaagtaaatatgagatatgacggcacttcacgtttccttcgagataaccgctggaatctattcccatcattctccttaggatggaacatggcccgtgaagcattttttgaagatctgaccgatttaatcagcacattcaagatacgtggttcatggggtgaattgggcaaccaaaacacagataactggtatccattctatcgaactattgatattaacaaagaccaatggggcaattacgcactaggcagttggctggtaaatggcgtaaaaccaaatatttccaaagaatctgcgctggtatcttccttactgacatgggaaaagacgcaaacactggatttaggtttcgacttatctatgctcaacaatcgtttgaatgtaacattcgactatttccagcgtaaatctaaaaacatggtaggccccgcccccgaactacccaacctcttaggcattgccgttcccaaagtaaacaacctcgatatgacttccaaaggttgggaaatacaggtgaactggcgcgaccagatacgcgactttaagtatggagttaccttatctttgtcagacaatcaagtggttattgataaataccccaatccgtcaaacacaattttagataaagacaataataatacgtattatgcaggtgctcacgtaggtgatatatggggattccaaacaatcggcatcgcaaagaccgatcaagagatgaaagatcatttggccggtatgcccaatggcgcacaggatgtactcggttccggctggggagcaggtgacatcatgtatgcggatttgaacggtgacggccagatcagcagaggtaacaaaacactggctgatcatggtgatttgaagaaaataggcaacagtacaccacgctacaactttggtttgaatctggatgccgcctggaaagggttcgaccttaaattatttttccaaggaacgatgaaacgtgattatatgccggggagtggttctacaatgttctggggagcagtaggctactggcaaaccaactttttcaaacctcatctggactatttccgcggagaagatacgactaatccgctaggagctaacctgggtggttattatccgcgtcctctcgagaatgatagaaaccgtaatccacagacccgatatttgcaaaatgcggcttactgccgtctgaaaaacgttactttaggttatacattacctaaatctttgacagagaaattctgcgtaaacaatctgcgattctttgtttcagcagagaatttatttactattaccagtctggccgatacgtttgaccccgaaactgttggcatcggcaactgggacggatgtacctatccgctatccaagactgtatcattcggtttaagtgcaacattttaaatgataaacgattatgaaaaaacatattaaacttttgacaataggaacattgctattgggcggactgaccggttgcaatgattttctcgacagggaaccactggataaagtaattcccgaaaaatattttgcatccgaaagtgatctggctgcatacacaatcaatgcttacccatttgaaacagtgaccgatgcgtatggcatcaatttcttcggcaaagataatgatactgataaccaagccagtggtgactcaccggccttctggatacccgggcaaaagaaggtgccgtcaggtgaaggcgaatgggactggagtaaaatacgaacctgcaactatttctttgataatactttaccgaaattcgaagccggcactattaccggcaatcaggataatgtgaagcattatatcggagaaatgtacgtgatccgggcatacaattattataaattactggtttctttaggagatctgcctattatcactactgcattgcccgacatagaagagaccttggtggaatccagcaagcgccagccgcgtaataaggtggcacgcttcattctggacgatttgcaaaaagcaacagaattgttgcttgataaaagtcccggtggcaagaatcgcatcagcaaaaacgtagctcacttgctacgtgcacgcgttgccctcttcgaagcaacttgggaaaagtatcacaaaggaacagcttttgtacccggtggaaaaggatggccgggtaatcccgcagatgtaagcggttttaatagtgatgcagaagtggcttattttcttgatgaagcaatgaagtcatcaaaagtggtaggcgactatatcgtcggaaaactggcagacaataccgatacccccgaaggtatgaacgccagtctggtttccatcaatccttactacaccatgttctgcgatgaaaacatggaaggatatgatgaaatactgatgtggaaacagttcaaggaaggattggtaaccagcaacttgcaaatggagttggcacgcaatggcggtggttccggatggactcgtggcatggtcaattcattcctgatgcgcaatgggcttcccatctatgcagccggttccgattataatcccgattgggagaaagaaggagtaaattccactttacagaatcgtgattcacgcattgttatctttaccaaaaagccgggtgatgccaacactgaaaataaaggtgatgtgaattattacggtgatgacggaactcccagttattgctcaatccgtttcatttatggcgataaaggaagtttggcaacaaccggattcatcatcaaaaaaggcaaacactactccagtcacatggcaaatgaccatagtgcgggaacatcaggtggtattgttttccgtgcggcagaagccatgttgatttacatggaagcttcgtatgaaaaaaatggtagaatcgacggaacagccgacggatattggaaagctttacgccgacgcgccaaagtggacgaagactataataagacaatcgctgcaacacagatgagcgaagaggctaaaggcgatttcggtgcttattctcatggccaattgatagacgcgacgttatataatatccgccgtgaacgccgtaacgaactttgtgcagaagctttgcgctgggaagacttgaaacgctggcgtgcatgcgaccagttgatatccaaaccttaccgtgtagaaggtatgctatactggggaagcaactatgaaacgcaactggcagatttatgtaaagtagatccggcagaaggtaatatgtcctcacctgatttaagtaaatatattcttccatacgaaaaaatcacgaagaataatctgattgccgggcagaagggattcctctttacacctgctcattatctgaatccgataggtatggctgtatttcgtcagacagcctcggataagaatgattttacaagttcagtcgtttatcagaacccgggatggaagattgaaggcgacaccggcgcacaacctgtagaataataaaaagataaaagaacaactctttgagcttacaaatatatcgaccttaatattatatatctgttatctttttatttttataaacttcattgtctcgcttcagattaggtagaactgcggtcaatctaatcctaagttaggcaatgaagttttacattcgcatgagttctcgttcaacatcctctgcagatgtataaaaagtctttgtgatttccatagtcacccaacagagattatccgcaaaattcactacatttgtatttgcttatctgtcaaccgggctaatcaagtattacaattactacactatccgattgataatatctaacttgaaacaaaggtgtatatgaatactgactttacaaacttaacaacagaaaatctttctaatgagcatttatgctgcattatccgcagcaaaaagtctcatcctggtattgaagcaaaacggcaatggctttccgaccggctgaatgaaggccatgtctttagaaagttaaacgccaaagctactgtttttattgaatatgcccctcttgaaacagcttgggttcccgtcatcggcgacaactattattatctgtattgtttatgggtgctaggtagcccccgaggaaacggatatgggaaagcattaatagagtactgtatagctgatgccaaagaaaaaggtagatccggcatttgtatgcttggggcaaaaaaacagaagagctggctttccgaccaatcatttgcaaagaaatttggttttgaggtggttgacactactgataacggatatgaattgcttgctctttctttcgacggaacagtaccgcaatttgcgccaaatgccaaaaatctgaaaatagaaagtgaggaactgacgatttattatgatatgcaatgcccctacatctataaatacattgaaatgatcaaacaatattgtgaaacaaatgatgtccctgtttcttttattcaagtagatacgctacagaaagcaaaagagttaccgtgtgtttttaataattttgcagtattttataaaggaagttttgagactgtgaatttgccacctatcgactatttaaaaagaatactcaaaaaataagaaatacaatcctgacttttcccattaattatcaggattgtattttatctgcttcattaaaaagacttctcatttgccatcttccacatattgagaaaagaggctttagtgatttctacgaccttatcccaattcaatcggtcagcatgatcggaaggctggtgataatcaggatgcccgtccgtatgataccagatgatcggaatacctactttggcaaacgaaccattatcacttcctcctatcggattttcccaggcgcggtaatccggttccaattgcaaaccgtattttctgatatcctctttcaaccaatcctcaaagaccggatgggcggctgtataaaaataaacgacctgtttaggctgttgaggtttgttattacggccaatcatgtcaaagttcagatagcctttgatttgagataggaaaggacaagtttgtacaaaatatttagagccaagcagtcctttttcttctccatcccaaaaagcaaagattacatttctttcgggttgctgtccactggctaaaaaggctcttgctatttgcagcactgccgatacaccggaagcattatcgtcagcaccattgtatatttggtcgccatcgagtgcaggatcaatacctaaatggtcgaaatgcgcccccacaatcacatattctttggtatttttaccaggaatcattcccaatacattcctcatggaaagcttctgatgaacttcctgtttcagtttaactatggaatcaggatgcacttccagacgtccttttttctgacgttctttacggtaagcatcaaaaggctggaaatagcagtcagccaaaggtgatactcccatccattgaagtaaggaaacaatatactccgaggtcacacgtgaaccatgaaaacctgcctcacgcccttgcaattcatcactagccaaaaagttgatagtagcttcggcagaggaacggttgatactctgcaaccctttttctacgttagtttgggcagataacaacaatgaaaaattacacaaaaaagagagaagcagaatgtttttcttcatgatgtatataagatttaagaaacaatcgtccatactttacttattttcaactatccagtttttatcattcaagatatttctattacaatcatctgctcccggattatcattaaaagaaatccgatattgccggggaggagtcggataataaatagcaggttccagcacttgccccaaggaatcaaacagtgtattcaaggcatcctcatccaattgattcgagtgacaataaagatgttctaacagacttccttgcggtaccattaaacgagttagctgattatgttcacaacgcaattcactaatattagagttatcggacagatcaagttcggtcaatttgttgtatgagcaacttaattcccttaaagaagggcaacatttcaatatatcagtaattgattggaaagcacatccttgtatcaatatcgcagaaattgaagtcttctcgttcaattccagatgtgacaatacttcattagaactcaaatcaatatcgcgcaatgccggcaagcttttaagggaaagggaagaaaaaccattataagaacaatataaactttccgcttccggatgactaccaaactctattgaagtcaatttgggattagaataaacttgtatagatcgcaatcggaaacaatcctcaatctccaaatgctccaaatcagcgaaactaccgatattaatactttccacattaggacagaaggtattcaagtccaattcgcgagtatcagaaatgctattcaaagccagtgatttcattcgcggcatatttcccaaataaagatgactcaaaggaagaagcaaaccacttatatcgataagctgcagctcttcagcccaaatcctcacttcatataatcctttatttccatatctatataccactccgccactcattgaagaaggatcttctattttctgtatacgaccgtttccccaatctatcaccattcgtcccccacttgctacaatgtccaactgccgccagtctcctacaacattcactgtaaagcgaatcgtgttttcatctgtcaatgccggaaattcaaaatcatctccaaacactctgttatccgtatctttacaggcagcaagggtagtgaataagataaccacccacatactccgaacgaataatatactctgtcttttcatcttatatttgagttagtaacatacaaaagtacgaaagaaatagatagcatacacgatagaatacaaatttataagtaactttgcacaaatttgattcgtaactgttatattgtcatgtggatacttattataagtctggtgttgctgggtgtcattgcgctgatagccggaattatccgcaacaaaagactgcaaaagaaaatagaaaagggcgaactggaccgtatgccggaagtgaaggaagtagatgtggaatgctgcggacaacacgaagtatgcgaacgggatagcctgctggcagctgtcagcaaaaagatagaatattacgatgacgaagaactggaccagttcattggcaaggcaggagatgcgtatacagaagaagaaacagaaatgtttcgggatgtattgtatacgacactggatgtagaagtggccggatgggtacgtagccttcagctccgtggcattgaactaccggatgatctcaaagacgaagtttttctgattatcggagaaagaagaaacatagaagtaaaaaaggcagatgacaggtgatgtgatggatttactacaatatacattctttcaacacgccctattgggaagtctgctggcaagcattgcctgtgggattatcggtacatatattgtaacccgccgcctggtatttatcagcggaggaatcactcatgcttctttcggagggatcgggttaggattgtttgccggaatttctccgatactctcggcagccgtattctcggtattatctgcttttggcgtcgaatggcttagcagacggaaagatatgcgcgaagattctgccattgcagtattctggacgttagggatggcactcggaattatgttcagcttcctgtcaccgggatttgcgcccgacctgtcggcttacctcttcggcaatatactgaccatcaaccaaatcgacttatggatgctcggcatattggcactcatactgaccggattcttttatctgtttatccgccctatcgtatatattgcctttgaccgtgagtttgcacgttcgcaaaagattccggtagagatttttgaatatgtactgatgatgttcatcgcactgaccattgtagcctgcctgcgaatggtaggcatcgtattggccatttctcttctcaccattccacagatgacagccaacttgttcacctatagtttcaagaagattatctggttatcaattggcatcggtttcttgggctgcctgggtggattatttatttcttatcactggaaagtcccttcgggagcttccatcatattcttctctatcttgatttacgccgtttgtaaaatcggaaagagttgttgcaggaaaaagtcataataatagatagtatatggaaatcaaaattcaatcactggaaagtatccatgaagcagcccgtgaatttatcgctgctatgggcgacaacactgtatttgctttatacggaaagatgggtgccggcaaaacgacattcgtcaaagcactttgcgaagcattgggcgtaacggatgttatcacttctcctacttttgctattgtcaacgaataccgttcggacgaaaccggagagttaatctatcactttgatttttaccgcatcaagaagctaagcgaagtgtacgacatgggttacgaagactatttctacagtggcgctctctgctttatcgaatggccggaactggtagaagaactacttccgggaaatgccgtaaaagtaacgattgaagaactggaaaacggaaatagagtaatcagactatgaccggacaatatatcgtacaaggaatctttgcgctggcaggaatcgtctccctgctggcgtcattgctgaactgggactggttctttacaacgcgcaacgcacaaaccattgtccggaatgtaggacgcaaccgggcaaggctcttctatggaatactgggaattatcatcattggaatggctgtattcttctttgtggaaacacggaaagccataggaggataatatgtttttaagagaatccttttgttttcttcccattttttactatttttgtatgaaaggaggatagaaaagtgaaaacaaccaatgaatatcttacaaaaattcgccaattcaaacaacagtttgccgagaaatatggaattatttctattggtatttttggttctgttgcccgtggagagcaacatgaagagagtgatttggatgtttttgttgaactaaaggatccggacccttttattatgtttgatattaaagaagaactggaacgtatatgtaactgcaaaatagacctccttcgtttgcgtaaaaacctccgttcacttatttcccaaagaatagcaagagatggaatatacgcttaaagaagaaatccaagacaagtttctccaaatatcagaatcaatatctatcattgaagaaaggtgtaagaacattcagaacgtagatgattttttgttatcaccttggggaatgaccatcttagacgcatgcatcatgcgaatccaagtaataggagaaacgattaaggctgttgacgacaaaacacaaaagaactttcttaaagattatccccaaattccatgggcaaaggttattggattaagaaatatcatttctcatgaatatgctaacattgactacgagattatctgggtagtcatacaaaaacatcttcctcctttaaaagagacagttgaacaaattataaaagacttatcatagtagttgtcgtgacttcatctccagatacttattaatcacatcaattgaaagattctccggtgtagttaataaagaatagatgccatgttgtttcaaagtagatacaatcagccgcttctcgtaagcgaacttttctgcaatcacgtgccgataatacccttccgtatcttttgccggttgggcgatatattccttcaaatcgacatcttcaaaaaagactacgagcaaacggtgctggcggtttagttgtttcaggtaagataattgacggttcattcctcctatgctcgagaagttagtatatagtaccagcaggctacgtttactgacatgtttgttcaaatgaacgcaaagagccgagaagtctgtctccccaaaagtggtctgctggctataaagactttccagcaatgtctgcatatatcccgattgcttggaagcaggcacaaaagtatcgaagtgttcatcgaaagtcactaatccggctttatcttctttccgcatggcaacatacgaaagcaccagcgaagcattaattgcataatccagcaaggtcattccacagaaagcttgctgcatcactctacctttatcgatcacattataaatctgctgtgagcgttcgtcctgatacacattcaccataagttcatgccgacgggcacttgctttccagttaatcgtacggtaatcatccccctttacatactctttaatctgctcaaactccgtatgatgcccaacccggcgaatacgttttattcccagttctgtcagattatcacttattgccaacaattcatattgatggagcatcagatatgacgggtacactttgatatccaaaggttctgcacaagtatagcgccgggatataaagccgatttttccggtcacaaaaactctaatatgaccgaaagagtaaacaccacgatgagtaggtcgaagacgataggtaactgtttttccctcgtttgctccaagcttcacctgaaagtcgacatcacgtttctgaaagataaaagggatctcatctatgatttctaaagatacaggatgcggataactactttctacccgaatacttacttcattttcgtcgccattagagaaacggtcggcacactggcggaaagcatggattccacgaatacgataaagagaatatacgtctgccagtaccaccaaaagcaagacaaagagtgcccactgcccgataacaaagaacggagcaaaaacatatccgctacccaacaacaggataactacgacaagggcaatatggaaacgacgagttagaaacaaatgatttatgatttatgatttataatttcttgggtttacgatttcttcaacttacaatttacgtacagtttataatttacgatttatgatttcttcgatttatgttatgaatagagtcagacatccaacgcgcagcccaaatcataaatcagaattcataaatcataaatcttttcattttggtacttccactttatcaattaagcgttgcgtcactttcactggagaatagccttccatttcagcttcggcagtcaggatcagacggtgctgaagtacataaggagctacaaacttgatatcttccggtgtcacaaaatcacgtccctgcaaaagagcatacgctttcgacgattgcagcatggctacagatgcacgtggagaagctcccaaatatacagctttgctggtacgggtctgctgtacaatcaatgcgatatattgaagtaacgtgcggtctacaaatacctgattcataaaagcacgaagcgacagcagttcttctttggtaatagcgggaacgatgtcgtccaacttcaccaatgcggcattggtatgatgacgttccaagatattcacttcctcttccaatgaaggataatccatcgttatcttcatcagaaaacggtcgagctgtgcttcgggaagtttgtatgttccctcctgctctaccggattctgggtagccaaaatcgtataaagatctcccatccggtgagtcgttccatcaatactgatctggcgctcttccattacctcaaacaaggcagcctgtgtcttggcaggagcacggttgatttcatcgaccaatacaatatctgcaaaaatcggtccctgatgaaaatcaaaaccattggttttcatattaaacacagtcgtacctaatacgtcactcggcattaagtccggagtgaactggacacgactgaagtctgcatcaatcagacgagctgtcaaacgggccaacagtgtcttcgcaactcccggaacaccttctatcaatacgtgtccattagccaaaatcgctgtcagtaccaaatcgactgtctgctcctgcccaactatgacggaagcaatccggtctttcaactcttgtatcttctcggaaaagagagttaaatctactcgctgttctgtattctcttccataaatttcttctttagatatgattgattatttcattcattttatcgatatataccttcatctgctccgcatcaataacacgtcctccgtaaatcacgggtctgacttcgcggataaatttagcaatctctccggcatccattccggttttccgggcaatccggtgaaaagagcgttcatcgtcggccacttcttcaatatccacctgaatctctctccgaagttcttcggccaaataggaaaacttcttgcgaactaaatccgcatggtctttcttctgaaagtaaagcgtgcctatcagttcggtaaattcaagagatttattcgccggctcgtgaataacagggatcacccgttgccgcctcttcgctgtgaatatcataaagagtatgatggtaatcatcgtcagatacaaagcccaacgaagcggctgatgtgccaacagataacggaaaggtgattgctgcacctgtgcagtttctttcatgtacccctccgtgcgaacgatgggaagcttccccatctgcgacaacaaacggaagatataggttgcatttttgccgtccaacattccgtaattggtaaaaatcaaaggagtggaaactaaaataacttctcctttcccccaccgacgggacatcgctacaggcatataaacaagactatccgttgtcaacgagtccgcctcggtttcataccggaactcattcgactcaaaaactctttgtgccaacaccctttccggaagtgaatctccccaaaaataagaggagcacaactggggataaaaatagaaagtctgacggggataaaccgtcgaatctcctatccaatgcaagctatcctttttcataaatgaagttgcatatttcttcaaagccatcggactgaagtaagaatagtaagacctgcactgcaaggtatcttccaaatatctgccgaacaaggtactcaccaacataatcttatctccgcgttccgccattttcaacagagcgtttacatcaacgtccgacaatcgcaaattatcagagataaccaatatacctctgcgttgcgtcgtatcttcctgctccaattgataaagacttttcctcgaaaaagtgtagccctgtggcaaagaagaagacaatacgctatcgaatactgcacatccgaaaggttgctcgtcatgatgtccgaaagtgggcttccacacaaaattcttcggcaaatgatattctattgcaaacatgatgaatagaaaagcgacaataaagacaatgaaccagcgacttcctttcatgagacgcctcctttccctatttcttcctgcaaggtctgcattgtgcggaagagttcttccgtcgcctcaaagttgccataacgtacccgcaggaaatgattggtcagttgcctgaaagccggtagccggacttcattgatatactgggtaggcgttttataaagttgccagtcaatacgttcagcgtcactaagttgtttcaaagtttgcagatagagcaaacgtactgcttcccggtaattctgacgggaaagcgcttccgcaatccctcccggaaaatctactccgtaaatggtgtcttcttcaactgtataaggcaacgcatttttatgcgagaccataaacaattccgggcgtttccgatagacaaaccaaacaatcagcaacaaaagaagaatggcaatacataccaggataagccctgaatactcttcagcaaaatgactgccgaatattttacgcaacaactccccaaactgccgactgatccactcaaagacattcatttccggagtaatcagttcacggttatagttgtatgccggttcagactgccagagggcaatctgcgccgtatcacagactagtgtatcagccggggaagtgagattcatctagtggaggtttggtttagagtttatcaaaattgtcaatatcactttctaccgttatgctgtccaccacttccgatgcatgaccatactgataaaccagaccgacgataccgaatatagccgataagtaagaaccatacaacatcaggatagagaacaaatattgcgcaaagttcagtccgactgatgaagaggttgcacctccgtcactcatcgtaaagatcatttttacaatatagatcacataccagggtatagaaacgataccttgtaacacactggcaataatccccatcacaattaaaattagaaagacgcctccccaggtagcaaatcccaaccggaatgtttttgcaaatgcctcacccaacgaaatgtcttcaaataagtagatgggagccattaatgccaaaggaaccataaaggcgaataaaagcgggatggtcagaatgagtgtgaaaggtgtcaatacagccaataagacaataaagaccaccgcaaagatgaataaaaagctgcaggcgatccccatcaaaaacagtcttttaatattacggagcaacaacgattttatatcgccgaatacaatcccgttcaggcgttcttcccgttcattatacaatcgtaccatcgcataaatcaaggaagtcatcaacaaagcccccaaacatgaaaaaaagataactcctgcataattcagtgcaaatgaaggtcccagagcagctaaaggattatcacttattcctccggacgcctgcatagcagtaatatctgtcatacttcccattaaaccgctaaagtttgcagcttgaattaagcatatagggagtatcagataagttgaatacttaaacaattgtttccaattctcttttataaaatcaaaagaagcgttcaacttctcaccgaaaggacgtttcacatacatcgcaatcttaggtttctgtgattccatgtttttttctatttggtaaataaatatagtagaatataataaatgccagagaagtgaatatcacgccaagcctcaacacatcaggaagctctgtgtgccgggtaagaaaaccttctataaagcctgccataatgaacaccggaacagtgccgatcactattttcaagcctcgcttcgctcctctcctaaaagattccagtcgggaataagtgccgggaaacagccagccgttgcccaaagccaatccggcggcgccggctacgataatcgcccagatttcaagcgttccgtgcaaccagatggcaagactggattcccacaacaaatcgtgttgataaaagaatgtttgaaaagctcctaccatgataccattggagagaagcatataccctgttccaaaactagtcagcaatcccattgcaaagcagttgaaagagaccatcacgttattaagtgtaatgcccaagaacatcggtacttcggaagaaccattatatacggccatcggctccccattggcaatattgtcgagtgtcatatccacataaccgtttcccaatatcagccggacaaaatctgggtcattcgctgctgataatacaccgattaatgcgctggcaacaaaaatcaaaaaggaggtcagtaattcgcgccgtgcatcgtgcatggttcgtggcacttcctgtgtccagaaggtaataatccgtgtccacttctcgcgtttattgcggtagatttcgttgtgcaacgctgaagccagattattcagataaatagtaatacgggaagttgggaaatgtgtttgggcaaatgccaagtcagctgtcaagtccgtatacgcatcggctagttggtcgggggacagacttgccgcccgctccacaactttctctgtctccttccatttttcaatgttccgacgaataaacgttacttctttcatgcttttcaatagatttcggataagttttgtccgaaaccggaagcaaaaataagagaattatgatatatttgcaacggaatcctaaaaatgtttaacctgaaatggcagaatctacgataataaccggacaattcgttcgtatcagtcaaacgcccgccagtatcggcgaacgattgatggctttaatcattgattattttctgatcgggctttacattttgtccactattacgctcttgtccaaattaaatttaccgtcaggattcagtttgttcttttttctatgcgtcgtttatttaccgattctcggttattcttttctttgcgagatgttcaatcacggacagagctttggcaaaaaactcatcaatatccgtgtcgtaaaagtagacggttctactccaagcatcggctcttatctgttacgatggcttcttttcccaattgatggtcccatcacaagtggccttggacttctggtcgttttattgaataagaacaatcaacgattaggggatctagctgccggtactatggtgattaaagagaaaaactatcgtaagatacatgtcagcctggatgaattcgactatctgacccaaaattatcatccggtatatccccagtcggctgatttatctctcgaacaagtgaatgtaattacccggactttggaatccagcgaaaaagaccgggcaagacgtatcacggcacttgccaaaaaagtacaggaattactttccgttactccccgtgagggtaatcaggagaaatttcttcagacgatacttcgcgattatcagtattatgcgttggaagaaatataaccagaatacgctgtttcagactattcaggcaagggattattctcaccgtagtgataattaattctcatcgcaatgagtattttttctcattgtagtgagaactttttctcataggcataagaatgtttgagaaaaagcaccgcacaaaaaaggggtatactcacagagcacaccccttatcttaattttatctgcaatgagaccggacgtcgtttagtccacctgtcccagagagtttccgtattccatttctccctgaaccacaaagaggacttcttcaggatcgtattcccctatttcatcctttttggcttcttttacaatgtaagccacaacctcttccaaatcgatgttgacatagccgtcttcatcgggttgagcgtcgagaatgccactttcagagtaatactcgtcgattaaatcgagaaaataatacaattcatcgtccgagaacttctctttcagttcttgaggcagatagtttttgataaactcgatggtcttttcgtcatcggcatctgctaataaaaaatcgtcttccagtcccatttttttaagtattaagtgataagtattaagtattatcgactataaaagcttcttcaccttttctgcgaataccggtttgccaactgcacctacctgtttgtctactatttcaccgttcttgaaaaacaatacagtaggaatattacggataccatattcagcagccatatcaccattttcgtctacatcgcacttaccgatgattacttgtccttcaaactccgcagccaattcttcaatgataggagccaccatcttacaagggccacaccaaggagcccaaaaatctacaacaaccggttttccttctgcaagaacctctttatagttgctgtctgtaatttctaaagccatttttttaagtattaattattaaatgttatttcgttagcttattctcgccacaaatataatcaatttatcctattgtgatagactttaattggaagttttataataatcattgagaatcatccatttactggaaaagtctaatttcgcccctaaaaatgaaccttaaataattaactattatggtaaatatgaagcaatgacaagcatatcattcagatatcagtcaactatcactgaaataataaatcaatcctttctacaacaactcccttattcttctgatttccgatattgtacaattcctctcgaagtgaaacttgaacaaagtcgataatcttccaatccaacgcaataccattattctcttgtgcagaagccggataccaataaggattcactcccggccaatcctgcggtaacatagccgccttagtcggtacaaggtcggataccggaatcaggatatccgatgcgtcagctttcaaattaaacgcagcaccatatcctcttccctctttatctacaaaattgcaaatggctttattagtattgttcaatccataagcgcgaatacgaatatatgcaggagccgtcttacttttactccgacaagttatccgatcacctatataatgggaaaaagtcacatcacaaggagctatataatcttcctttttctccaaatcaggaacagaaagctgaaaggcaggcagcaattccggtcctgatactaccgagctgaattgtgattcggggctcctgaacgtgcgtgtacgacggatatgcttccaattgtcctgtggtcctaaaagagacaaaggagttgtttcgtttatcagacgcatggcgtaagtagcttgttcataatagtcccaccgttcgggagtgcaatacgtcttttccggaaacaagattgtatcatctcccgtatctatgccgaaatgatactcataatcccccttagcaagccagcttatatcggctttcgccgtatagaagaagccgtcttccgccgtcatcggtatgcgcttgcatccccaaggtttcagcatcagataaacatctacctgttgaggacgtttggggccgaacacctcacaccggaatgtcacctctttatcagcagtaaactccggccatgtatgattggctattttccactctttcatcggagtctgatagaaatctttggcaggaagttcttccctgctaactatctttccatctgatagcagatattttccgggcaatacaaccatttcagtttccagaccgggaagctgtatttgaatgttccgttcattgtacgctgattttcttgacactctgtgtttattcagtattttataaggatcatctatatccattatatcagggtagatttccagttgccaagtattatcatcctgtttgtcaagaaaataaatacctgttcccgaataacggactaccggagaagaaccaaccccagcaatatgcttcaatgctgccagatttttgggacgggtaaacgtagtatttgaataatagaacatatctccggagttcaattcactcaactgttcatcgtaactcacccggaaatcgtcgaaagttctgttatccggataatacccgaagtgtttgccacgcgggatacgacgcatcacttcagcggcaatcatactgcttactgcctttgaaggagtaaagaccatattgaaaaaatgagtctgccaacctaaattcatcggggctgtacgcagcatatcataagaaaagatggcagcaaactggataccgcccctacggaactcacgcgccatagccgggaacataaaaccggaagccatatccgttgcgtcaaattcataaacgatttttgcttttccgcgtaaatcaggatgaagcatctgctcgtaacggtctacgaacaacaagccgtttccttcaatggaataattgttattcaacgcactcggataccaagcatgagtagaaccttgtatatccgatttccgaatagcaggagccacacggaagtcttggctgacattatagaaagtcaacttcttacaaccgatactccggattgccttgcacatccggttgatataacgcaccatacctggaatgtcttccggaaattgggtaggttcgttgattagctcgacaaacaatatgttcggctcatccttcaagcagcgaccagtgtaaggattacgatgattgagcagttgcttcatgtaattttcctgtgcacgaatagcttcctcgtcgtgtataagtgtattttcaggataacatttggccagaccggtatttgttgtatcactcatttccggccattgtgaattataggtcacgatagggctaagcaacatataaatatcccgtttatccgcttcggcaatcagatagtccaacagatgcaaatgttcattctccagcaaatttccctcacgatccgtattctgatagtctccccaaaagcagagacgtaatccgtcccagttcattcgcttaaaatgttccaggtcttccacaatcatttgctttcgatcgccgcccacataatctgctgcacgaaaatcgcaagcagaaggcaggcaataattggcaccgaacaaagctacttccttacggttttccgtccaacgtatcacgccttgtttgtccatatagaccttctcggcacaatatcccattgtgccgagaagagttattaataatgtaaataagcttttcctcatgatatttatgattatgatactaatttcagggctacaaacccattacaaattgttctccccaatgcattaacagattatgaccagcgttattaagatgagcattgtcatctttcccttgaaaatagcgtgaccggaaaaccaggtcattaggattgataccactagtatatgcggcatttaaaactttgacgtcatttttacggcacatttcctctatgatgtttattgtcgccggaaatccttcatacgctacattccagggagtgacccaaccaattttggcaccggaatacttccttttcaaccctttcagcagttcatccaaacgttggcgcaacactttttgccggtcaatatctccgtttaccaaatatgcatcattatgaccggcaatgatgagtatatagtcagcgttttccggaataatactatatcgcttatataatggtgcgccatatatactttcacgctcgaatgcgatactgttgccgttttgtccgagattctgatacttcatgccatgcttcgttgccagtttataatgccaagtctctgaaaccggacaaccatggttatacacataactatctccaataacacacatcgtttttccttcaagcgttttttccttcatataactcactgcaaccggtgatccataaggattgatgtcaatagtaagataatccccccgatatgatacttgaaggtttttgccgtcctgaacagctttcatgcatcgattcttttccattccggcaatcttcaaggtaagtggcatacggaatattttgctgtcaagactcaaggcgggagtaattataagggtattattacaccaacgggttgtcagagtgacggcattccgttctttcacataagcttgtatgttcgagaaagtatcaacccataccgagtctttcttgaaagcaagttcacggaagaaattccatagaacccacggttcatcccactggtcccatgctgtataaatcccgtgagtcatggtcacaccccaccgcctgtcattaataagttgacgtaaccaagtatctattgatgccgcagtacaacctgaattccgttgtccgagtccgaactgttcaaggcgtgcccctacttttccttcctcgcatacagctctcacctgaggtgtcgttgcattgaaagggtaaagaatgcttgtgggttttactcccgtctcggccttaataatggaatcattctttctaatttccactaaaagagtacgcctgtctatagctgtcaagtttggatgactccaagaatggttacatatctcgtgaccgtcagccaccatgcgcctacattcttcccaagtgagtcgaggggcaaaatggtcatcaatatcccccataaatttgccatttatcccgaacgtgccccgaagtgcataccgattcaaatggggagctactaaagtataatgctcttggataccatcgtcaaaagtaaggctcactgcggcttgacgatcacccaaaaaatcagcaacacttactgtttgtgatttgacagaaagagacaaaaaaagaaaaaagattgtcatgcagaaaaactgcttatttcttgttaccaagtactccgttctacaatctggcatatcgctgcacatttttttgattttcatgattagatacgaatcagtagttgaaagttcggtttcgatttacattcaactactgattcacgtgaactatttatttatctccacttgatattgaggaataatctccacgttcttaatttcaagcacttggttatttcccttaaaatcaggaatagcagactggggcaaatcttgcagacaggtagcatccgaacgtaaaggacggaagtagaacgacatagcttctttgttcatcatctctttatggcggttaagaccaatcatccatggttgggcatgccagaattcatcctgtaccatttttccaccgaggaaggccattgccacatcacccgtgtaatctatcttcatgaagtattcattcacttgcggggtatgaacggtatcactgaaagctacggtaatacgacgagtggttatcttctctacacgacattcggggctgacaggctgaacctgcactgtttgtgattgccatccttttgccgaagggtacaagatataatcaaaggcgttatttccaagttgttgcagggtgataccttctgccgtcggtaatacggtagctgtcgttatcaatagttgcccatccaccttgatggcattgagtgcctgttcatgattcagtgtcgtaatttttattttcttaccgttgcggggtgtgacagtaatagtacttttcagaccgcttgtgacggcgtatttagccttacctttgacggtgcgggcatcaaaacaatactccggtttcataccttccggggcgaagaaaatataatggtcgataccgttatcattgattttcatcagaggttgtgctgtagcataacggagtctggcacttccgagcatcaagttgaatggcagaatcatgctttcatctttcggcaatgtaaaagttccctgttcaggtatgcacagtgtttcattccgaagattcaattgcagttgcagaccgtccatatcatgccgcaatgtatcatggtcctgaaagtttatcatgaaaatgaatccgctgtcatctttcatccgggcagcataacgcagatcatcacgattttcgggtgtcatcttttcccaaccttccggtaatacggtttccatgagagcaagattactgccgaaatcggcaagaaacgaatggatggtgcgcaggtaacgataagacggatgttccagtccgaattcgccaagaggagcctggaaatcataggagattttgggcatccccatcggttcgtcctgataacttcctatattatcctgacgtagtggagtgcttcctccgtgatacatataatatccgatgccgttgcttccgctaccgagcgtacgaatcatcaacgcctgtgctgcacgtgccgtaacgataggtctgcgtcgataaatcatctgtattcctgcacccatttccgcacagaacgaggggaatcgttccgcatcataacgcaccggagcataatcaggcacacggtgtatatctttgaacatacagaaaggcgacattctcggttcttcccaaaaaggataggtgtaggcggatgtcacaggaattgcttcattgtcaataacagctgcgtttccccagccggtggctgtatagaacggagtgataataccttcttcctgtgccattcttttaagggtacgcatgtgttcctccccaagttcggccgtagtgactttcttatccattacacttacgccaatcatagcatagtcaatgtcataacttgccacagtaaaatccaacggttcaccgggataattcactccccaaggagatgcagaatgctgcatctcattttccaactggcaaccgatgatcggaccgccatccttataatacaatccttgcagttgccggcctatctctccataaagtctttttacataagagaggtatagaggctgattgctgcgtacatccaccggacgggcgaaaagccagtcgggtatggagccgttacgtatttcaccgtgacagaaagggccgatacgtacgatgaccggcatgtcatgtttcttgcaaagttctataaaatggcgtaagtctttattgccgctccagcagaacttgccttcctcttcctcatgtaatccccagaaaatataggttggcaatacattcaccccaccggctttcatctttacaatctcctgttcccactgtgcacggggataacgggtaaagtggaactctcccataacaggtatcacaggctttccgtcgatagacatataatagctgtttacggaaatatttccacccgacgggttactgccccccatcttgaggtgtcccgtatatatagtcttctctttcgccggagcggaaagctcataaatctgctgtgcatgaaaagtggttgcatatagagcaaacgctaaagctgcataaattttcttcttcataatatgtgtttttaatgatgtaattcttatttaatcagagtcaatacttgattcgcaattgtttccattccttttacagtaggatgcccgctttctttctcgattccttgcagttgtacgtattttattccgtaatgttcgcaaacaaccttggtcgattccacaatctccgttttcaagtcatcactgatgataaagtaaagcgtcacattgggataatgctcttgagccaactctatcaatttagccaatgcaggacgataggtatacagatcggcacgcttgaaatctccatatttgtactcaccgataggagtgtttgcccaattgtcattgattccaccgaagatgaggatgatatcaggattccccaaacggggaacccttgtaataaatgaacggtcggcatagtcctcgtcattatatcccgaataggatacagtagccccgctataggagtcgtttgctcccaacttgaaaccggctttcttgatgacctgccaccaccacgtctgtttcacattcactacccctgtcttagaccaatcggtagttgtgtaatatgttttattggtgtccggaatatacttttcaaaggtagaatatgaatcgcccaagaccgcaacagtcggtttgatactttgcgctaccgcatttaccgtaaacaggcaggcaaggatatataagaatatatatttcatggtttatctacttactactatttactatctatcataatcattttgcttgatagcccctttggactcatcaatgaaactctgcggaatccagaaacggttgtgtccttcgtgtacattgaagtagccgcgtccttcggatttattaatggcatcaatgcggttattggcatattccacatactttccaaagcgaatcaaatcttgacggcgaagcccttcgagatagaactcatgaccgcgttccagaaggatggtttcattgaaggcttcaccggaagctgtttgagcgtcatccagttccgacaatccggcacgcttgcgtacacggtttaccaaaccaatggcttccgttgtaggactgccctcattacggttgatacactcggcaagtgtcaacagcacatcagcgtagcgatagataaccacgtcaatgccgctttgtccgtctttcatatccggatccataccgtatttcaagggtagcgcaccctttgccaactgactgctatttgagcggtctatcttttctccatttttattcgtataagcagtaactacgttcttcagacgcaagtctccttcttcaaatgtgccataaaaatcccaaggcattacatagccaccccaaccggtagccttttcagcccaaggataatcggcgggaagcacttcggcagtcatgtagttggagtaccaactggcagtattattgcaagccagttgcagaatcacctcattgttgcctattccctctttggagaagatatagttataatcaggttgcaggctgtacacacgtccttccatctccaacaattcacgggctaaaatttccgctttatcgaagtagccttttatcatgtaatatttcaacagaatcatacgtgccgcccctttcgtcatacgtccgcgtgcctccgccacttcgggtaaatcacgaattgcatcccgcaagtccgcttccatcattgcgtcatattcttcttccgtcagacggggaagatagacaaaagtctgcgggtcgtccaacacctcatccgaagccaccggcacaggaccgaacatatcataaaggtaaagccccatccatccgcgcaaagccttcgcttcacccgaataaagcgcttttgcgtcttcactcaccggagagttttcaatacgacgaatggtattacgtgctttcgaaagaaaattataacgctcgaaatttgagtaagcatgattctgaatactgcctcccacagtagcataccactgttggaaataaagttcatctgactcccacgcccagcaacaccaaagcacatcagtcgtcatatcacctattacttgatatcccatataatccgctgaataaacagctttgaaatcaccggggttaaaatcatagtagagcgaatttaccgccagtttcaagtcagtctccgtcttaaagaagttttccggagagatttcggtatagtccaaacgttccagttcacaggaagtcatcgataacagcatcaaggctgttgctatatatttcattgttttcatacccagtatatattagaatttcacatccagaccaatagcaaatgaagactgattcggataagctccgataccgtttccggtttcaggatccattcccttatatggagtaaatacggccagattgcgccctgcggcatacagtctgactgaacgaatcttattcttgaaccattgggcagggaaagtataaccgattgacacattatccaaacgcagataccaagccttttcgaggaaaaagtcactcttcttggggtcaacgcccgaagaagcctccgccacacccggtaatgtacccataggattggcaggcgaccagcggttctttacctcatccaagacattgacgccatacgtaatgtcttcaattccataaatggactgcaacttgatgtcgttcaccttccatccgttcagagaaccgtacaggtaaatgttggcatcccagtttttccagcggaaagtattgttgatactgaaaggaatcggagtactatttgccaataccaccatgtcggcttcatcaagcacgccatcccctcccgttgtccggatataacgtccttcactatcccgcatcttttcgcccttctcatccagttggtaaccgttcaaatcctgatacagaatagctccggcaccagatttctggagatggttgtaaatccgatccatctgaatcaggccattcgtcctgtatccgtagatgttgtcccatctttccacatagtcctgatagacagcaggaatgaagtccggatcacgtttcgttgtgtgattgcggtaataggagaaattgatgtcagtagtccagccaaagttcttattgtcgaaatttacactgtggataccgatatctataccacgggcacggtaaactgtcgccgaattgtaatctatcgtcttcacttcctgataggacatcaaatttttctccagaatgacatccttacgcagacgttggtagaggtcgacagacccggacaaacggttgttgaagaaaccgaaatcaataccgaagttatagtcggtcagtgtctcccatttcaatttatcattgcccagtttggagatagccataccgtttaccaagcttccgttaggtgcaaatgcgccttgtgaaactttataataggtattgataccggtgaggttgcccgcattaccggtttgccccacacctgcgcggagtttcaggttgctcaaccaaccgatattcttcagccagttttcttcattcatacgccaggctgccgatactcccgggaaagcgccccattgatgctcctttgagaagttggacgaaccgtctacgcggagattcacagtcaagatatatttggatgccagcgaataattcaaacgtgcaaggaatgaagccatttcactagctcccttatatgagctgatagtcggtttttcctgctcacttgtcccgatattgttcatcaaagagccgtcgtatgggaattgtgaagcgacgatacccatcccttcccaagacgacttcttatattcaaaaccagccatcaggttcacgtcatgtatttcattgaacactttcgtgtaattggcaatcacattgaacaggttcatttgcgatttcgcattttgcttggaagcctgaccgtccacactatatccctttttggtcgtggtgggaatgtattggtcggcctgcacatctttcatatcgaaaccgacagtagcttttatcagcaaatctttgattggtcggaattccagataaccactgacaaaaaggtcgcggctcactgtctggtcggtaatatccaataacgaaaccggattcgggtagacatcacgaatcggatttacggaatatttaccctcttcatcacgcaccggtacggtaggaataaatgtcatagccgagtatatcaacgctgaattatcatttcgggcatcacccaacggtacatcgtgatactttatctgtgagaaagtggaattaataccggctttcaacatacggttgatagtctggtcaacattcaaacgtccggtaatacggttcatcgaattatttttggcaattccctggtggtcataataactcaatgagaacaagtatttagtggcgtccgtaccggcagaaaccgaaagattatgttcattaacgacgcctacacgggttacttcatccatccagtctgttccgtcgcctacgaaattagcaatctgcccatcagtatatttcttttcatccccacgtcccagttcatcaaacactttattctgttcaatcataaaatcacgcgcattcaggaaatccggcgcatccttaatatactggaaagcaaccgaaccggaataagagatgtcgggcttacctgtttttcctcgtttggtagtaatcagaatcacaccgcccgaagcatccgaaccgtaaatagccgccgcggaagcatctttcagaatatcaattgtctcgatatcattaggattgagattaatcagagcattgtctttctcgccaccactatatgctgttcctgctgtcactgtttttgttgacaactgcggcacaccgtcaattacaatcaacggactttgtcccgaaagcccaccacgaatagagatattcatcgaaccgcccggattggcactgttttgtgtgatattcattcctgacgaacgtccacgcaacatggaacctactgaagctgatgcagccgttggcaattcatcggcttttacggaagccaccgcaccggagatactgctctttttagtcgtaccatagccgactactacaatctcatccaatgttttagtgtcttctttcagtataaactccatcggtgtagcggacgctttcttctcttgagaaatgtaaccgatatacgaaacggtaatcgttgctcccgagggtacgtcagacaggctgaacttaccgtccaaatcggtaatggagccattggtagtacctttcacgactacactcgcaccaataatagcttcaccagccgggtctttcaccagtcccttcacttggatattttgtgccatcagtgaagtagccaacaacaggaaggtaaaaaagaatcctgtcctcgcacatattgaatatattgttttcatagttgttctctttttattctgttactttcttgattgtagcccaaagaatagctgtatcgaaggtgatttgcactgcaccgtcatagtcgcttgcatagcttgccacactgccacctgcgcttgtagtatcttcccaccagccgcatccggtcgcatcgccccaatagcggagaacatatccccagtcggacacacgggctgcatagtattggcgcgtacttgaataactgccgatttggtgcaaggtagaggtataacgatatccattgcgcgccatctctgtagcaggcgtaccccaatcggcaaaatcactgaagccacagccggacacggtgagcgatcctgtataggttgtcgctgaaggttccagtttccacatgctataagtatgtgcctgcaaatcaatccaaacaccataatagcctgactcagccaccgtaacaggtaccacataaccattattattcatcagttttgaattaacgtaaggacttacaccgaaaaggtcaccgtccatcgttttctcagccgtaaaatagatttggaagttcgccttgtcagcataaatttttccttcatattggtattctcctttgcgggtcatcggtgcatagtagccgtcaaggtagtcgtcagctttctccgaagcattaaccacccacattacagggtaatcttcaaatggttcttccttctctgccaacataacaacaaccgtagtaatgacaacagtttcattgcctccggcatccgttatagtcaaagtgacaggaaattctcccgtagtaaaatcaatagtacgtttcaattctccattacgcccggttacttttaccgtctcatctatttgcatactggggatttgaagacgaatatctttcaactcgcgatcatcggtgaacttcacattcagactccaacttcctttatttgcggctgcatcgaaatctactgctatccgcgacggaagttgggtttgcataatcggactctccatatcagcgacataagtcagcagcacatttttcttgctttcccgaccgtctacgtcacggatagtaatcaataaatattcttcaaaactagcgtttttcggtacaatgagttgataatcataattaaagactttaggcttctgcccgccctgttcatatactttatgaatcccccattgttcacaacttaatgtgacgctttccaatcctacataattagatgcggttcctgataccaaaacggtgtcaccgggaaacgtctctatctcatcactcattacataaagaccgggagccacatcttccttatcatcatcgcaaccgacaacaaaatacataagtgccagcaacaaactgatttttccgaatctacttaaaatattcttcatggtatcttccttttagttgttatatttgaatgcatccaatacttccaatctatttccttcataaccaaacaaggtggtattgctcacataattcttggcacccagttcccatcccatgccttccacttcgataaagataggatcccaataaagaaaaccaagtatgcgaccgtctttcgcttgttttatttctttgatttgctcaagtatgaagtttttctgtccaagcggggaaaaatccaaatacggcccgttgtccgacagttgcccctgagttccgtcaggcaaagtcttgtcccaactatatccagtttccataattaaaatatccttatcaaatttagttgtgatataatccgcccattcacgcatttgtgctgccgtatttttcgtccagaaaggataataagaagtaccgattatatcatatttcgtatttctttttttcagttcaccataataccagttatacaagtctttatctccggcacctgccgagtgaataatgacctttgaatccggtgatacagctttcaccgcatcataacctgtattgaatagttcggaaagctgcgcaaaattgtcacaacttccatccggatataacatgccggcttgtacttcattacccaacgagacaaattcaggagtcgtcccctgtgctttcatcttattcatgaaatcaaaggtaaaatcgtagagtgcttttttcagtccatcaaagtcgagcgcttcccattcgtgcggtttgttctgctcttctccatttgtccagtaatcactataatggaaagtcaactgtatctgcataccggcttgtttagctctttttgccagccgcaaaacatcttccggtcctgaaatacctgcgggcaaacggttggaaggagaatagtccggatttcccgggtcattgtacagacggagacggacaatgttgaaaccattattcttcaatatttcgatgcagtctttttcttcaccgttttcatagaatttgccacccatctgctccacgtaagtcagttgtgagatatcaccgcctttcaacagattatactccttctcggttttcttcaaacgcagcccgtcaaagcggctccagtttgcttcagccgattcgctatggatttcaatatcacatttaccgccttccacttttatcccgcgcacataggagcgaatccaggtagaaggagatgcttgtaatgaagtcattttcttagtatcggtgccggctgccacataacaagaggcttgtcctccggtactcttataataaaattcaaggtcataaataccatcttccaaaccgttgacagtttgacaggtggataccgtatatgacgaagttgctccataatgtaaagcatagttgccttcacatcccccttgcaccacttttgcggcagaatagtccccgcttactgtccagcctttaggagaagctgtttcggcagcgtcttcttcaaaacttccgttaggtactttcaccactgtaacagcagggtcggggttagcgactgctgccggatcatccgaacatgcagccgtactgcacataacggaaaagccaattgcaataaagcctgtaattttcatgattaaactgtttttaatatttctcatgtcattgttatttaaggtttatgtaaaaaggagcttgtgacgatgcttaaaattaaacatcgccactaagttgtcctaccctatcaggcttctaaaagcctgaatcccctgatgattaatatccaatctttctacctcacttaataaccggacggatttctccttctggttcagtccccaatatcctaatgccatcatatatttgcagtgaattacgttccttatcgtcaagtcatcctcccaaatcaacaagtcgggtagcgacactgcaaaataatccattttaatcttgtcaaacaagtgtttttctccataagaagtcaatttatgaaagcggccgttagcctcatccatacgcccgagcttcaataatgccagaccttgatagaatatcttatcgggtttcgcatcgttgtagtacatggcggcagccggctcggtaggtccgatgattgcctgttcccaacattccgtagccttgtcatgttgtcccaatccttcgtaagcacaacccaggaagtaataaaaatcattctcctgtgcaccatacaatttgccttcaccaagatgatgcggatattccagacattcttccaataatgatattgcttctttattctcaccggcagttaatgctttctttgccaattccacacgagccagttgatattgggcaggcacttttccttcgccaccctcccagggatggaagttatgtgcatccaataccgttttcgccttttcgtactctcctgtctgattcaacaaggtgatttcttccagtatcaggtcatcacgctgcttaataagttcaggatattgttgcaggaaagctaggcgctctttgtgcgaacgacggacacgcttgtaaagttgatcgagttccatcaagatacgtgcatcggttgtgtcaaggcggaaagcacgttccatacattcgatggctttcgcttcctcatttttcttgttgaagaatgccaaagccaggttacgccatacggtcggaaagctaccgtccagtcttgcggaagtttcccatgcttccatagccaggtcgtactggcgcttgtcgtaatacagattacccaaatagtaaggagctcttgcatcgtccggattctgtaccatggcacattgcaaagcaagaattgcttccaaacggttgggaaaacagtaatcggggcaagctttgactgcatcggcaaatgcctgtttcactccggaaagtcccccctggtgcagacaccagcccagataatagtaagtcattggtgtaacaataccttcggcaatggctatattccataaggaagcagcttcctgccaacaacctgcggcacaatagtcaagagctatttcatcatagttgtgaggttctccacgcatcatctctttcatgacagacaattcgtcgactacgttcgttatcagatacttctcataacgacagccaaagttgaatttatcaatagccaatgagtcttcaatcagttgcagggcttcttcggttctgcccatccggcggagaatagcagttttcagagcgcgggctttatgattatgccagttgcggataagcgaacggtctatttcatctaaggcatcttccaaacgactttgcatggtagaaatctgcgcgcaggcaaagtatcccgcatcctgccaggcggcattccaacaagatttatagaaacggtcgtaagcctcattgtatcgtctctggtatttcaaggcaagaccgagattatagatcggttctccgtcgtatggattcggattacgtttctgtaaggtctttacggctgtaagcaagtattgctccgctttatggaaacggcctttacggatataccatagaccaagcgcattgttattacgcacatcaatcggatcacggcgcaatgcttcttcgtagtattctacgggattgtatgtggcgtgtctgtactgttccaagtgtaagccggtcagataaagctgttcagtagtctttatttcttccgggagcagggctgcttcagcagcgtcgggaataggtttcacttcttccggttctgcatgccaataaagtaattcccttccgtttgccgtgatttcaagaatcagtttgtcgagcttctcaccattcacatttaccgtttcatccagcaattcttccggagtgatagtcacttccttgctataatatattttcccgtcttcacctttcaagacaacatttaccgtttggcgcgaagtagcaaatatcttgaagcgaacgctgtcctccccttccggttcaatattcatcagcaaatccctgctggcattcttcaccactcccaattcccggtaaggcaggaaatattgaacgaagctcttttcttcgtaaggttggagccaggtaaagtccggttgattttcggtatagacacctgccatcagttcaatgtacggcccgtcttcgtccgtcaggttgcggtcccatgcgcggccaaagtcgccgtttccccacgtccactgtttcttgcccggagaaatgtggtggttcgctacatgaagcatgccggcacgagtatcattctcatatccaccctcaaagttaaagcgggagttgacagccatataggaagtaggaaccttgatattcttatagttcgagatatctactccggcagaataatccatcttgtagtaagtacccgttgcgatggggaaactggatacggcacgctttccatggtcgaaaacggcattgatatcgggcgggaatacgctctgatagtagtcgttcaccgctacggcagggtttgcccaccacaggaaggtctgcggtacttcagtacgattgtaaagtactcccttgatttcaagaaaagcatgtcccggacgaagcgtaaaacctgccattcctttctgatgaaacatacgttccatttcattcacccataccgtgacacttccgtcagcattttcctcaatagtcgtatctacaggcatgtaggtgctggggcggtgatgttgaggccagttaaactcaatgccacctgaaatccacggtccggcaagccctaccaaagcaggctttatcacatgattataataaatgaaatgacgttctctaattttatcataagccatctgtacacgtccgcctaattcgggcagaatcatgaccttaatgtattcattttcgataaaaatagcattgtattccttatccactttctcattggacatcgattcaatcacaggataaggataaactaccccgctgctgccttgatacacacgcttctccaagaagatcggattcttctccggtttgcctacttcataagtagggataaccaccttttctttccatgcttttaccatcgtattattgattataaatttgtttttttattcgttgacaaagagatcaagagacaaagaggggtcagggacagggagattttacattctccctgcctgattgatgatgttatccaatacctatttacttacttgctaatttgccaaactgttatttttttatttgattaaatccttttccaatgcttccagtgatttgcctttcgtttcgggcaacgcacggaagaagaacaaatagccgacagcacaaatgactgcataaatccagaatgtaccactgcttcccaagaaattattcagtaacgggaaagtgtatgtcagcgtgaaactacctacccacaaagcaaatgtacaggttgccattgcaacggcacgcacccggttcgggaagatttcggcaagcagcacccaagtgataggccccagggacattgcatagcaagcgatagccagcacaacaagtaccaccataaagaatccgcttacctcgaagaaatagcaagtgccgagaatgagataaatgccagccagccctccggcaccaaaaagcatcagagcgcgacgtcccaagcgttcgactgtatagatagccacaaaagtaaaaactacattcgccacacctgtcaccacaatattaaagagaacatctcccaacgaataccctgcagactggaatatctcctgcgcataattgaagattacattcgtaccgcaccattgctggaatacagccacaataatgcctaaaacaagtaccttgcggaacggacggctaaacaataaccgcaatcctccttccgacttcgaagaaccggtttcttccaccaagcgaagttcctgatcggcataatcatcaccacctattttactaagcacattccatgctttctcttcttttcctttcatcgccagccagcggggactttcggggatgaaacatgccaacaacaagaatatcgcagcagggaaggcagccgcccaaaacatccatcgccatcccatctgcccgttccatgaagcacaaatatccacaggagaaaagtctgcaggaataggttctgcaatcagccagttagtgatttgagcgcccaggataccgagtacaatcgtcaattgattcagcgaaacgagttttcccctaattgacgtaggagctacttcggcaatatacatgggagaaagtcccgaagcaattccgattccgatgccacctaaaaaacgggctgccaaaaaccaactaaatgcggaaaacgctccggtagcataagctgaagacaagaatatgaaagcagaaattatcaggagaggcttacgtccataacggtctgccatcatgcctgccaccatagcgccaatcaaacaaccgagcaaagccacgctcatggcaagtccctgcatggcgggtacatcggcaatatcgaaatagagttcatagaaaggcttcgctccccctatcaccacccagtcgtagccaaagagaagtccgcccatcgcagagactaaacatataaaatagacaaactttttattataacttttcataccattagaagattgattaattgatactgcaaagatagagcatgtcaagagcataaaaaatagaatttcattcgataaagatggacaatcttattttttgcagtttatttgatagataagatacattgttatatatttgcgcagaacagtcgaatcatatactatgagattatggtaaagttgaaagatggatttaccggagaaagagctttagtgcttccccgcattatcgttgacaaaatggaagaagaccctcttacctccatgctacacattactgacatcggatattatccgaaagccaagcatcacttccgggaacggaaagagcctatcaaccagtatgtattcatctattgcatagacggggccggatggtatcgcatcggcaatcaggaatataccgtatccgccaaccagtattttatcctccctgcgggagttccccatgcctatgcttccgacaaatcgtatccatggactatttactggatacactttaaaggtattctcgctcccttttacgctcaagaggcaagccgcccaatggatatccaacctgaatcgcattcacgcatcagtacacgaatcaatttatttgaagagatattcaatactttgaagaatggttatagtaatgagaacctgcgttatgcattctctatgtttcatttttatttgggaacattgcgatatatacaacaatttcgcaatgcaactgcaaataatgatgcagcagaagatgaaaatgtaagcgaactggctattcattatatgaaagagaatatggaaaagcatcttagcctacaagatatagccgatcagatcggatattctccttcccacttctccctgttgttcaaaaagaaaacaggccatagtcctttgacctatttcaacttattaaagatacagcaatcctgccagctactcgacactactgatatgaaaattaatcagatatgctataaaataggtatagaagatacctattatttctcccggttattcagcaaaatcatggggatgtctccacgtgagtatcgtaaatcgaaaaaaggataacaaagattgaaaaaatagcacacaactatataaataaaaagagactatgttttctacaacattgtctcttttattatttttctaaattttaaattaacctccttatctttgttccataaagaaatagacaaagcaaaattcttatttcaaaacgccataaatcaccaataatcaatttatatgaaatcccagttccggacgttcctttaaatatgttattaaatcccgccccaccgaaagcttaatcggacgggaaatcaaatcaattgacatgtggcttacatcggcatcatccgtcactttaaaatacaattccgtatttcccggatgttccttagtcagagtggcaagttcagtaaccaaagccgagttcaagaccgacagaggaatgataatcgtgatcttctgcaccagttcttctttcacatcgggaagaagctccatagaggtgattttcacttccaattcatcctgccgccattgtttggcttgacagcgagccttgatatacaagaacgttccttcattgagatatccctgataagtcacccagtcgtttccccagaatggaatctcggtagaaccggaatagtcctcaatcttggcaataccatacggatttccgttcttgctaactccacgacgaacactggtcacaattcctcccatcgttatttcacgaccaacaagtgcagctttatcttccaaatccgccatccgtgtattgcagacatgttccaatacgatagaaaattcatccaacggatgagcagaaagatagataccgaccaaatcacgctcacgattcagacgatcaagatcactccaacgttctacaccttgaggaatttcaggagttgcaacatcaataacgttttcaccaccgaacaaagaattgacagcagctgccttatctgcctgatagcggttaccataacgcatcaatgtctccaggaacacttcccctttagagtttacagcaaaatattgttcccgtttcagttccgggaaactatcaaatcctccggccaatgccagacattccatattcttcttgttgcaggcattcaggttgacacgttgcacaaagtcgaatataccgaggaaaggaccatttttacgccgttcctccattatgctttgtacagcagcttcacctacacctttgacagcaccaagtccgaaacgaatatcaccgtcatggtttacggtaaacttcaggttactttcattcacatccggtcccagcgtctgaatacccattgctttacattcgtccatcagtttcgtgatatcggtaatgttcgacaaacttcggctcatgacagctgccatatattcaggagggtaattggctttcagataggctgtttggtaagctacccacgaataacaagtagcatgtgatttattgaaagcgtatgacgcaaacttttcccagtcggtccaaatcttttcaagcactctcgggtcgtgtccgttcttacgcccaccttcaataaatttaggtttcatgtgatccaacttgtcacgcaacttcttacccatggccttacggagtgcatcagactcaccacgagtaaagtctgccaataaacgtgacagaagcatcacctgttcctgatagaccgtaatcccatacgtatccttcaagtacttttccattacaggaatatcatactcaatcggcttgcgtccatgtttacgatcaataaaatcagggatataatccatcggtcccggacgataaagggcattcatggcaatcaaatcttcgaatgtagaaggctgcaattcgcgcaggtacttctgcataccggcagattcaaactggaatgtaccaatcgtacgtccgtcactatataatttataagtagccggatcagaaatatctatcgcatcgacatccacttcaacattacgacttaaacggatattttcaacagcttctttgataatagacaaagttttcagaccgaggaagtccatcttaatcaacccagtatcttcaatcaccgagccttcatactgggtaacaagcatcttttcgcccgtttccttatcatcagcagtgctgacaggtacccagtcagtaatatcatcacggcagataatcgtaccgcaagcatgtacacctgtaccacgcacgttgccttcaagcattttggcatacttgatcgtatcccgcaacagtggatcagatgacgcttccgctgcttgcaattcgggaacataagcaatagcattcggcaaattaagtttcttgtcaggaatcttgtcaggaaccagtttacacaaacgatcggattctgacaaaggtagcttttgtacacgcgcgacatccttgatagccatctttgtcgccatagtaccatacgtaataatatgagcaactttttcctgaccatatttatttgtcacccaacgaagtacctcaccacgaccgtcatcatcaaagtccacatcaatatcgggcaaggaaatacggtctggattcaagaaacgttcaaacagcaaatcatattggatagggtctatcttcgtaatacccaaacaataagccactgctgaacctgctgccgaaccacgtcccgggcctaccgacacacccagctccttacgtgccgcattgataaaatcctgtacaatcaagaagtatccggggaaacccatcgttttcatgatgtacaattcgaagttcattcgttctttgacttcttccgttagaggttcaccataaatttttttagctccgtcaaaagccagttttgccagataatctccttcaagtttaatacgataaagtttatcataaccacccaagcgtttaatttttgctttcgcatcctcttcacttaataccacattaccatgttcatcttgagtaaactcgtcgaacaagtctttttctgtaaacttctcccgatacccctcctctgttccgaaatcttcgggaatggcgaaagtcggcataataggcgcatggtcgatggagtagtattctaccttatcaagaatctccagtgtattgctcaatgcttcgggcacgtcggcaaagagttcgttcatctcttcgcgtgtcttcatccattcttgtttggtgtaaagcatacgggtaggatcatccaaatccttaccggtactcaaacagatcaaacggtcgtgcgcttccgcattctcttcatctacaaagtgaacatcattcgtacaaatcagtttgacattgaatttcttagcatattctatcaaatgtttgttcacattcacctgtaacgggtagcattcgtgattggcacggggaacagtcgctttatggcgttgcaactccagatagtagtcatcgccaaacaagttcttataccattgtattgcttcctccgcttcggcaaattgcccggcagtaatccgtttcggcacctcaccaccgagacaggctgaacaaataataagtccttcgtgatatttttccagttcgctacggtcagtacgcggacgcatataataaccgcgcgtccacgcgtgcgatactaatttaataaggttgtgataacctgtttcattcttagccaatacgatcaggtgataaccactctggtcgggcttgccttctttcaggtccatagtacggcgtgccacatacatttcacaaccgatgatcggtttgaatagtttgttttccgcttccacgatcttagctttgcaagcagcaatctccgcctctttatcctcgcactctatcgtgccggcctcaattcctgcaattcgcttcttcaggtccttgacttcacctttcggaccgctgttcttcttattgacgtagttcgtaaattccttgataccgaacatatttccatgatcggtcacggcaatacccttcatcccattcttcatggctttatcgaccagacgagctacgctagcctgaccatccaacaaagaatattgcgtatggacatgtaaatgaacgaaatcctgcataatgataagtagttaatttgaaggcataaaattacgacctcctgggttataaacaaaaataatcctcaaaaagttatcaacattcgcatttctatgctcatttacttgctgaatttttaaattaagtatatttttgcagacaatatcattaaacagcattcatgggccgactaaagaaattgaagaaaatacgtattcaccgcgaaggaacacatatattatgggctagcttcttgctattgctattaattaatgcggctctttattgggggatcgattgcaaaataccattttatgtggtagcggtagcgagtatagcagtctatctgctgatggtgaatttctttcgatgtccgatccgtctcttcggacaagacaccgaaaagattgtcgtagcacccgccgatggaaaaatcgtcgttatcgaagaagtcgatgaaaacgaatatttccatgaccgccggttaatgatatccatcttcatgagcattgtgaatgtacatgccaactggtatccggtagatggtactattaaaaaggtagcgcatcataatggcaattttatgaaagcatggctgccgaaagccagcacagaaaacgaacgttctacggtagtgatcgaaactccggaaggagtggaaatactcacccggcaaatcgccggagcagtggcacgccgtattgtcacctacgctgaagtaggagaagaatgttatattgacgaacacatgggatttatcaaattcggttcccgcgtggatgtgtatttacccattggcacggagatttgtgtcaaaatgggacaattaacgaccggtaaccaaacggttatcgccaaacttaaataattctgtcacaatgacaaacgttattaaaaatagtattccgaataccgtaacctgcctgaaccttttctccggttgtattgcttgcgtcatggcttttgaagcaaaatatgaactggccctacttttcatcgctttaagttctatttttgatttctttgacggattgttggctcgtgcactcaatgcacattccattatcggaaaagacctggattcattggcagatgatgtcagcttcggagttgctccctcactgatcgtattctccttgttcaaagaaatgtactatccggcaaatatggagttcatcgctccttatctaccctatttggcattcttgatttctgttttttctgccttgcgcctggctaaattcaacaatgacacacggcagaccagctcttttgtcggactcccagtaccagccaatgctctgttttggggttcattagtggcaggggcacatgacttcctgatatcagacaactgccatcctgtctaccttcttatacttgtctgtctgttttccggactactggtatcagaaataccgatgttttctttgaaatttaaaaacctgtcatggaatgacaacaaaatcagttttatattcctgattatctgcattcctcttcttctatttcttggaattagcagttttgccgccattattgtatggtatattttactttcactttttacaagaaaaagtaaataaacaatctcttggcacgtttgttgtactatgagttttatcaaagtaacaacataaaaatcatagtccgatgcatatacttttattcatactcatttttatcattgccattttcgtatttggcctttctattgtcggcttcatactaagaacgattttcggattaggacgtagttcttcttcatcccgcccgaaacagacggaatcaggacgtacaagccaacaaagctataaccaaacgaatcgccgttcaaatgatgatgaagaagaaatatattccgagaatgttccggagaaaagacataaaaaaatattcacccaggatgatggcgaatatgtagattttgaggaaatcaaatagccattacactgctttcatttccgtttcgctgcaaagaactctttcattagtgcagcgcattcgtcagccattatcccttttacaaccactgttttaggatgtagagccgaaccggcatatttctgatagccgcgtttttcatcttcggcaccaaacacaagcttgcctgtttgtgcccaagcaatagcccctacgcacatcacgcaaggctcaacggtgacatacagggtacattcgttcaaatacttaccaccaagcacgttggcagcagctgtaatagcctgcatctcggcatgagccgttacatcattcaatgtttctgtgagattatgggcacgcgcaataatccgctctttacaaaccacgacagctccaacgggaacttctccccgctcggcagccttacctgcctctatcaaggcttgtttcatgaagtaaatatcgtccagcattcccctctttaatttttaattttcaactatcgcctcatatcatgttcaccaaaaagggtgggataatcttcttccatattcttatggataaacatgagaattgtttcacgaagccaacgtgacttgttcgttatcttatatttctcaagataacgatctacaatctgctgctcttcgtcgctcaataaaatgctcatccgtcgttcccttttggtacactcgacatgcattttcaggcacttcttactcctttttctcatatcttctgcaaaattacttttacttctgtaaaaacaaagaataaaagcagtaaatttgcaaaaaaagatggctgaacataatgatttaggaaaatccggagaaaatgccgccgtagcttatcttgagcagaaaggttatcttattcgtgaccggaattggagaagaggacatttcgaactggacattgtagctgcaaaagacaatgaactgattgtagtagaagtgaagacgcgcagtgacactctgtttgcagccccggaagatgctgtagatttacccaaaataaaacgtacagtacgtgcagcagatgcctatatcagattgtttcaaattgacactcctgtacgcttcgatatcatcactgtagtaggcaacgacgggaatttcaaagttgaacacatagaggaagcgttttatcctcctttatattaaagaatgctgtggctttacatattcatcattataaaagccgtgaaattcgtgcaatctgcgctttaatttatgatataaccaattatgaaaacatactataattattaattcattatgaatgtagaaactgtcagagaatactgcttgaacaagaaaggagtcaccgaatcttttcctttcgatgatgtatcactggttgtaaaggtaatgaacaagatgtttgctctcattgacctggaagaagctaatcacatcgcactaaaatgtgatccggaaaaagcaatcgaattgcgtgaacattattcgggaattgaaggggcttatcattttaataaaaagtactggaatagtgtccgctttgacagtgacgtagatgataaattgataaaagagcttattgaccactcttatgatgaggtaatcaaaaaatttactaaaaagttacgcgcagaatatgatgccctcccctgatacattcccggttccattgattcatatcaacgagacgaactcgaccaacaattatctgcaatctctctgttctgaacagaaagtggaggaactaactgtcgttgtcgccgattttcaaacttccggtcggggacagcgtggaaattcgtgggaatcagatcctggcaagaatcttcttttcagcaccgttatcttccccgagtttttggaagcacgacgtcagtttcttatttcacagattatatctttagctattaaagaagaattggatacttatacctccgatatttcgatcaaatggccgaatgatatttattggaaagaaaagaaaatatgtgggatgttgatagaaaacgatctgatggggcgaaacatcagtcagagcattgtaggaatcggaatcaatattaaccaggaagcatttcacggcgcagctcccaatcctgtttcgatttatcaaatcacaggaaagcaatatgatatttttgagatactgaaaaatatcatgctacgcatccagtcttattattgccagcttaaacaggatgatacaacatcaatcgttacccgatatacagaatcgcttttcagaaaggacggaatgcatcgatacaaagatgctgacggagagttccttgcacagattgtatgtgtagagcccgaaggaagattaattttggaagatgagatacagacaaaaagaggctatatgtttaaagaagtggaatatttattgaaataagtaatctacaaactgattaaaacattatctttgaagccgatgttctatataaaaactctctcatttatgaaaactagattaatattcctgtttccattactatggatgctaataggttgtagtgattcaaattctgattcagcaactctagaaatttcccaatctacatttgataatattaattcggaaggaagtattataaaagtatctgttacatgcaattctacttggaggacgatcagtaatcaaagttggtgtattccaaacctgcaaaatggtagtaatgacggagaacttgttttgaccatacatgccaataccacttccgaagaaagaagtgcgactgttaccattatagcaaaaaaaacaaataaaactattaaaataacccaatctccttctacaagtacaactggcgaacatcattacagactacccgttatattccacgtcctttatgaagaccctgataatagaaagcaatacgtagatgaaggtcgccttgctcaaatcattaacgcttgtaatttgcgatataaaaataaaatgtatcaaaacgcaagccataatattagtcaggatatgaatcttgaatttgttatggcaacagaaaagccggatggaactactttagaggaagctggtgttgaacgaataaaatgggaaacaacccttcctatgtcttgcgaacaatttatggatggagaagataaaagtcaagctaagaaatatgcgaaaatgctatggaatcctaaagtatatatcaatatctttgtatacccatttagcgaaaaaaatattttaggaattgcacatttaccttattatttatcatcatatccgttagacggcttaaacaaaggagattatttcttaagccatgaggtggaatatcctcactgcgtctctattaatagtaattatatttatgtaaacagtaataatgaatactactacacgaccgatgtttacaatactctcgcacatgaattaggacattatcttggactacatcatgctttctctgaggatggagataatacagatttgtgtgaagatactgattattgtacagatactccgacttacaacattactaaatatacaaagtggattaatggcatagataatccagataagtattcctttgatgagttatgtacaagaacaaactgtgaaggcagtacctttatttctcacaatatcatggactatgctttttgttattcagaccaatttacattccagcaacgcaagcgtatccgccacgtattatcttacagtcctcttattcccggagtaaaaaaatacacatcaacagatacccgctcattaagctgtgatgaacaaccacctatacaatttagatattagtatttgaataagctaaaagaggtgaaccgcttagcgattcacctctttttctatcctcaatatcttatccaatgtcttttgagcttctgttgatgggaaacgcagaatcactttctgcaaagagttacgcgctttctcataccgggtagtaaataacttcgataatccatctcggtagcgggcatactgcattttagtgggagaagaaagttttttataatccgtctctaacttttttttctcctgttctgctgtcaaataataatagtttcctaaaaagatattagccgccagattatccgcctcaagttgcaatattttttcgtacatacgcaaagcatctttctcctgcccgcgacatacctgcatttctgcgcaagcttccaaacaatctacattattaggagtcttttgcagtaattccttgtaaaataaataggctttgtcgtaattccgattctttttataggcaagcgctaattctgtagccagtttggagctaatttcactgttcttgtctacattcgtccaataatacatttccgtacggtctatattcagagcgattgtctgccggaaatagctcacagcctgcccattctgccctgcctcaatggcagcagacactttttgtaacatctcatcaaccgactgcgcattcagcaccagcggcaatgaaaataaagagataagaaaaatagttaaggtcctcataatccatctgattgctatttagttcgtgacacacaaagatacaataaaaaaataaaaaatgtacctttgttcgcgaaaagaacaatcaaattgataaaagtgtttttatacaatgacagatataaaaaaatcctccgtaaacagacgaatattacagatagccatcccatcgattatatcgaatattaccgttccgctactgggacttatcgatgtcactatcgtaggtcacctcggttctccggcttatatcggagccattgccgtagggggaatgttgttcaatattatctactggatttttggattcctgcgcatgggaacaagcggaatgacttcacaagcgtacggtcagcatgatttaaacgaaatcacccgattactactacgttctgttggagtaggattatttatagcactttgcctgttgatactccaataccctatcctgaaactggcatttacactaatacaaaccacaccggaggtcaagcaactggcaacaacctatttctacatctgcatttggggagctcctgccacattagggctttatggattcgccggttggtttatcgggatgcagaattcacgctttcccatgtatatcgctatcactcaaaatattgtcaacattgtagccagtctatgttttgtctacttattggacatgaaagtagcaggagtggcaacagggactttaattgcccaatatgcaggtttcttcatggcaattttgttatatatgcattactatagtgcgcttaaaaaacgaatcgtatggaaagaaatcatacagaaacaagccatgtaccgtttctttcaagtcaaccgggatatattcttccgtaccctctgccttgttatagtcactatgttttttacctctgcaggggccgcccaaggagaaatcgtattagccgtgaacaccttgctcatgcaattatttaccttgttttcgtacattatggacggatttgcttatgccggtgaagcattggccggccgttacattggtgccaaaaaccaaacaggcttacgtaacacagtacatcaccttttctattggggattcggtctttcactggtattcacgattctctatgcagctggcggaaaagaattcctgggattactaaccaatgacacttcagtaatcagcgcttcagacacttatttttactgggcactgattattccgttagccggtttctccgctttcttatgggatggcattttcatcggtgccactgctacccggcagatgctttactccatgttagttgcctctaccagcttctttggaatctattacgttttccatccccttttaggaaatcatgccctgtggctggcttttctcgtttatctttcattgcggggaattgtacaaacccttttgggaagacaaataataaaaaaagtaatcgtatcccggtgaggctatccgataaattatctctatatttgcggcaaacaataaaaagcaaaaggtatggcaaagtataaaagaatcttactaaagcttagtggagagagcttaatgggcgaaaagcaatatggcattgatgaaaaaagactagcagaatatgctgaacaaatcaaagaaatccaccagcaaggagtacagattggtatcgttatcggaggaggcaatatatttcgcggactaagcggagccaataaaggttttgatcgtgtgaaaggagaccaaatgggaatgttggctactgtaatcaacagtctcgctctaagttctgctcttgtggctaccggtataaaggcacgtgtgttgacagcagtccggatggaacctatcggtgaattctatagtaaatggaaagctatcgaatgtatggagaacggcgaagtagtcattatgtccgctggaacgggaaatcctttctttactactgacaccggttcttcacttagaggtatagaaatcgaagcagacgttatgctgaaaggtactcgtgtagatggcatttacacagctgatcccgaaaaagatcctaccgctaccaaattcgacgatattacatatgatgaggtactgaaacgcggtctgaaagtcatggatttgacagcgacttgtatgtgtaaagaaaacaatctgccaatcgtcgtatttgatatggacacagtaggcaacttaaagaaggttatcagtggagaagagataggtacgttagtacataactaatatttcactaccgatattcatttgtctatcagatgatactctactctgataagacattgattattcatttagaaataagaagtgcgaattttgcagtatagctttaaccaaaactaatcctgtaaaattcgcactttgtttttcctctcaaatattatatagaaacaaacacctatttatcaaaatactgaatcaaatcatacgcattaaaattcaattcgcgggcaaagaaagataaataaggaaagagttgataagaattatcataaagacctttattagcaggtttcgacgaattatccgtaccatcatcatcctggtatttgaaccaatgccatccgatacaattcttagcttcaagcaatcctaatgtaaaatgctgataagcataagctctctcgttttgtgtagggacagaatatccggctcccgactggttattcagatcagagtcctccacccctttcgtataaaactcacttacaagaaacggtttgtccgcccaattagcccaatcagcaatcgctgttgtcagttcaggactccaacgactataataattgatagaaataacatcacaatattttccggcagctctcactactccttccatgtatttaggagttccatgtaatctagttcccagataaagcaacttatcatctactttcttcactgcctctttcactgctttataatatttctctgctacaatcccggcaaactcattattcaagtcatccgtcacactttgcgtacctttagaatccataaaagctttcgccgcaacataagccggatcacttgagttactgatagccagaaaacgatccaaaatccgggaactgtttgaagagaagtttatctcattatctgaaaagaaacctaacacattaggatcccgcaaataatctgcgaaagcactacctgccaaatatgattcacaccattcagcccatccattataaaacacaagacctgccgcgttatcatcgcttcctccgggataattataagacttcgcactcttgaactggcttaaaaaagcaaatgaaggcgccaaagttaacggactgctcggattggaagcattatgagtctgaatcagtgaataagttcctgtgcagaaagcacctgtaccgtgaaagccgatctcactcaattcacgttgagtagtagataaccatttctcatcagctccaaacctgctattccaggccgttttattacgactagaagttcccttacgcaaagaagtcgcactacgctccagatgcagacaaccttccggatcaaccaaccaccaacgtccgtctattttcttcgtataaaatcttcccgtagccgcctgtttcggaagcgtagtcgaacttccgtatttattaaccgactcctgatacgctttcaacgttttaatagccggtttatacccgtccatatacgcaataatacgtgtattctctgttttccaactggatataggcggataagcactggaatacttaacactgatagggcgatacatattggcatttaatgacggagtatacatcacagaagctccgggagcaggcaaatcttccggatattccgactctacatctccccctcccatcactatgtcaggaggcataaaattaggatctttatcatcatcatccgtacaagacaccataggaatagaacttataaacagaaaagttcccaatataaatagttttttcatggtatgtattttatttattattagttgattgttggtcgaaccagtcagccaaacgataagcgttgatattcaattctttcatagcatcagccaacggtttataaagattgtattcattatctaccagtcccttgttagagtccagattcgaaggatctaccccttttgccgtcggatcattatcctgataacggaaccaatgccatccgacacaattcccactttccaataatcctaaaacaaaatgctgataggcatatccacgttcctgctgggtttgaacggtgaaacctgcccctgttgtgtttgccaaccctgaatccattcctttcgtataaaattccgtgatgatgaaaggtttttgagcccattcgccccaatgcttcatggtcttctcattcggtgtccatgcaccatagtagttaatagcaacgacatcacaatacctgcctgccgcttccacaatctggcggacaaacttaggttttccatgtagacgactacctaaataaaggtgattgggatcatacttccgaatcgcttccgacaccactttgtagtatcgttccgctactacccccgcaaactcttcccgatgttcgtccgtaatttgctgcaaagtaataccctgctgtttcaaccaggattctgcatacaatcttcccggatcattgggattcttcaaagtcagatacccctccagattcttcggcccgaacggcagttcattatccgaaaaatagccgatgatatttttatccgttttatttgcgaccagtttttgtgccatctcatcgcaataggtttcgaactccgggtcaaaaacgaaaatacactgattaggatatcccgtattaccaggtaactgataagttcctcctcgtttcttcccatatccactcatcaggttcagaatgattgagcgagtcagtacctccttatgagaggcattgtaagaggcaatagcttcttcattactccaggagccggccccggaaaagcccagcgaatgaatcatccgtgccgttccttcgatccatttttcctccgtaccgaatttgtccagcattgcttgtttattgcgttcggaagtacctaaacgtactcctaccaccactttctgcaaatgccgatacccatcgggatcaatcatccaccatcgatctccgatacgttccaccctgaaaaatcctgtagcccgatgcctggaagcatccaaatcacttccatacttattcacacgtactttaccagtaggtttgaacccatccaattgagcaatagtacgggtatcatactctttccagggaagatttttctgtcctttcacccacggacgggcagtgaccttaaatgtatgcccctgggcataaccaaactgggataacagcagtaaaaacaatataactatactatttttcatcatctaatattcttttacgattcgtattgcatttaaaatgggcacagactccaccgctccaaaacgaacaacaagcccctttccttgtgaaaccggaacaatatatttcttaataaccgcacgttcggaaccgtattcttctgcaatattaagttgcttggcaacagatactccatttatatccacagaaaatacccggttaatatagtcctccctcaccacatcatttcccaaattatacaccaaagcctctcttttattttcagaagtaagttctgtccaatataaatatacagcataaacaccatccggtacatctgccttaaaagcttcaatacctactcgctgtgtctggaagacaggatcctgatccgtccccagtatatctgtatcgctggccggcaaagaaccgtaacgagttttgttcggagccacttccccaccaatatatccccatgaaccttctgcataagcctgttcgggtatccagcacatctctgctatccggtcctcaaaatagcgtcgagcacccagtagtacattgatttccgtaaagccattcttcacattgacacatttaaaatcacaaacatactggtcacgatattcacgtccctccttttcaatcacagcatccaccacattctttccgtttacaaaaggaatgtccacggaaaccaccttatctgctaccggatatactcccaaactttttccattcaaaaagacctccaccttatccgcgttagtataaactttcagcggttgcgtacaactctttccatcccgactggctcctgccctattcttccaagatttagaagcaatatgcaggacaggtgactctttcagataagcctgataaagataatatccgtccttacgttctctatccgtacttaccaaccctttattgttcacatgaggcatggcatttcttctggcttcggaataaaaatcattcaaattccagaccatagcccccactatataattcctttttagaatttcaggcaaataatgttcatgatagacagagccgaactcacaactaaaatcaaaccgcaccggcgaaaaagagtgaatacgagtatctacatccgccccatattcggtaataagcaacggtttatgaggaaactccttgtgaagttcttccagtttctcttcaaatccgcccaaattaccaccataccatccattataaagattaaatcccaataacatcggcaattcagtgatccctgcttcctgatagatttgggaagcagaatgacaaggcaacatggtatagcgttccgagtccagacttctgatctgcgcctcaacagccgaagctatttgatgaagagacttcatatattccgcccgttctttcttgttgtctggattaaagggaggacgcaaaagcacttcattcatgtaagcccaaatgatgacagacggataattatagttctgataaaccatttccgtagcctgctccacacagttatccataaacgccttactttgagtaatagcatttacaatcggaatttcaaccgaagtcaacagccccaatttatcacacatctgcatcacaaccggatcttgcggataatgagccactcgcaggaaattacttcccatatccttactcaactgtatatcccggatatgcatttcatcccgcaaggcattccccattcctttgtaatcctgatgccggctggtaccaatcaatttccgatatttcccgttcaggaaaaaacctttctccgcatcaaaatgatattcacggattcccagcggattaacaacgcaatcgagaacttctccctttttattcttcaaacggctatacaccttatataaataaggagaatcaacatcccaccgtttgggttgcgcaatagtcatcaacgcttcaaaggctacattcttctctcctgccttcacattcactttctttgcggaaagtgccactctattaccgtctgcatccaaaatctccgtttcaagaatcaatgcctgattacttttcaaagcattagataagaatgtttttgcacacacttccgcttgagcatctgttatcccaacagttttgagatatactccactggaagcataatgggtggtagacagttgcacgggcgaagtatacaccagataaacatcccgataaagtccgccgaagaaagtgaagtctgccgaaagaggagcaatatccggattataagagttgtcaacactcactgccaccaaattgcgtccgatatgaacatagtcagtcacatcaaacgtaaaagcagaataaccacctttatgattccctaccaactttccattcacaaatacattagtctcctgattggctccttcaaaacaaagataaactctttgacctgcaatcagttcctccactgtcacggctttcctgtaccagccttttccccggaaataaccggggatttcatcttctgcatcttttgcattccaagtatgaggaatggaaacgtcagtccaaccggacacatcaaagtcaacaatggacgcgtctccctcaaagagggagaacttccaaccatcgttgatcgtttgcgtcacacgctgaccgcagaccgtgccggcaacaatcaataacaagcaggctaagattatttttctatataccttatacatacctaataccattatttcgagattgaacggactgcacgaatatatcttgccccagtctttttcccatttgctttatcccaagcaagcggttttccaaaacgtacataaaatgcatttgtaccacttgacgtttcacgactagcccaataagaatctccggtagaagaagccgctgccgtattcatagcagttcctcctacattagtaactatcagatcccatgccgcacgatttgctttctcaaaatcagtaatcgcattcggattatcctccgtcgcatctgctactttagtcccattataggtttcaaacatctgttccagatccgatcttgtaggccaataccatccggaacctttatccatacaatatttaagagcaggcatttccgctgcattcggcaatgctgccaaggcagtagtatttgccaaaccgttatcattagataaagtcactccggtagaagccggagagtctgctgtagaccatgccaaattctctctgtccaacgacataatcttagccttaccacgattagttccatctacccagaaaacaatgccacctttcaacgatccattatctgtaattacctgtcccaccgcaaactcggaacttaaaagtcctctctgtgtaatcgtaacctcttgtttaggcgcattcgctccgcttccggctgttaccgtagcagtcgttacccggctagaactattcagattgggagataaagtccaaaaataaagagttttacttgttacatcaacatacgctttcacccaagattcatcagtgatatttattgcaaattctgtctcatcagaaatcattgtaattacctctgattttgctaccgcatcaggagtaatagtcaccgcattggtactcaattcgagggaagcgtctccctcggcagctacattttgattcaccgttacctccactgcttttgcggctgcgccagtaccggctgttattgtagcaattgtcgtacgaatattaccagtggtattttttgattttgccttgaacgtaactgtagtacctgaaatagtatatgaaagccaggaatcatctgccaacactacgctgaatacactcttattggatgtcaacgtaacatttgcttccgcttcgttagcaccttccaatgtcacaggattgggagcaaccgtcagagttgccggctcttcaggataagtataatcaccaactgtgcgcatacatctcacaaaacggttggtagctgttttatttcctgcatcagcaccagactttccgaaacgtacccaataagccttatcccctgctgcattttccgtactcgaccaatagctttccccattgcccgaaccggcagcctcgtttatcacatcaccctgcaaatcagtcaacatcttatcaaatgccgcacgtgccgctttttcaacttccgtcaacttatcaggtacaaccgaagcaaaatccggatcagcatgtccaataccgttgtaaacatcaaacaactcccataactcatcacgtgcaggcagataccatccctcacccaacgactgacagtatgccactgcatcatttgcagcaggagcagtaaacaaagccgtattggcatatccattcactgtagaaagcgcattatgagacatcacagaggactcaaaaggatttcctccctgacgttttacagatacagcttttcctaccatcttgtccgaaggatccacccagaaaatcataccaataccatcatctacactttgtcctaccttcaaagaaagatccggttctttggaatcctgtgtaaccgttacttccactgtatatgaaccgcaagtcagtttcacgacagtactccttgcatcctcaccgtcattctgcgtcaaggcagtgtatattacacttttagcgtttacatctacagaaagccactccgcttgatattgagcaacaacttgaccgacattagtatataatagcgatgtgacggaagaacccgccgcttttgccaggtttacttttgtatctttacaattaaattcaggcatcacacgtaccgacgcatcatcgacacaggaaagcagccccagatttaaaatcaataacagatatattattcttttcatactcattcatgtttttcagataatcaatcgcttaataccaattctcattctgtggaaaattctctttccccatcaagtcaatctgctcctgtggaataggccaacattcgtgctttccaactacaaaactggtacgacattccgcataatctttatctaaataaggattttcagcttttgtctcgccataatgcgctttcaccctttcacccaaaagacccaaacgttttagtaaaggccaacggactccctcgaagttcagttcacgggcatattcatccaaaagaatatcttgcgtcagaggtcccgcaaatttgtcattcccggcacgttcccatgttttattgtagcagcgcagagcatccgtgctcattcctccgtcacggcgcatatacgcttctgccgccattaagtaagtttcagccagtcgatagacaatcaaatccttgaatcccgttgtccggtccggattatcggccatagtccactggtcaaagtattttttcgacatgaaatgcaacgtctcacaataactggaacttttcgcaaggggaatcaattcgccatatttaggagaagtaggatcattgtatttgaaacggtgtacaaacaattcattgtatcgtgtatctttagcctgatcatacaaactcaataaataggtattcggataaatacgtccccaaccatatccaccctgatcggccgtattgatacaacctgcaattttattgattcgggtagtggtctgaatagagatacgatgtccggcaaccggagttccggaacctcctccacccaagttttgtgaatattggaaactccacaacacttccggggatttcaaatctgcgctattaaatacattctcggccttcttttccattgagtaaatgccctcctgtttaaagatgtcttcacattcctcaatggctgtatcccaatccgattcccacatggcaacctgtgcacggacatgtttggcagtcgctttcgttacccgtccatacaatacatttccgttattttgaggaagtgaccagtccagacctttcatcgcatcatccaagtcagttgtcatcagtgtcatcagttcttcatgagaagccggtttatactcccgtttcagattatcgacagtggttggagtgatgttcagataaaggcggtcaaagcgtttccaaagttcaaaatagctccgtcctctgaagaatttcgcttcactccatgcgtgcaatacatcgctgtcatccagtcccaaggcttctgccgctacaataatttcatttgcttttccgataatcccatagtgatgtttccagaacttattgacatctccagtacttggagtaaaacttgtattcaaacgtccgattgaggtagaaacacctgctctaagtatggcaatatccgtattaaagtcacacatggtaacgatgtacaaattagattcgttattatccgctccacccggcaattcacgtgccagggaatacaatcctgtaacggcagtattcaacccttcgggagtagtgaacagataattattcgtcacgtctgtttttgattccagatttaataaatccgagcaggaagcggtcaacattccgcaaatgacaaaggctgtatatattaactttttcataaggattctttattttagaatgaaacattgacaccaaacacatattgtctggactccggataagaccctggagtcagttcgggactataagatttaaactccgtaaatgtcagcaagttagtagcagttgcatacaatcgtaatttatgaatcggagtattcttcaatagtcgggtggggaaagtatatcccagttgtaaggtgcgtaaacggatataagaagcatcctgaatggcaatggcactcaaatatgcagggtccgcactataagaaggacgtgggaatttgttcgaaggattgaacggagtccaataatccaccttcaccccattcaattttccacgtaaagaaccaccggaattatactcgtacaaataaccgttcttaatctttctgccggaaactccataccagtccatgaacaggtcaaatcctttccagttccatgtagaagaaagggagagtgtaaacttcggatctttacggataggtaccctgtcatcagctgtaatctttccatccccgttgttatcactcaccttgaccattcccggttcaatagcgccaccgtaattaatcggactgtcggccacaccgtcattatcactgtcataagtatttttcggtgtatagaccagatttcccgtaccatcacgagtgatatcaaaatcatcatactgaaaaattccatctatcagataatcatagtatacattgatcggttctccgataatccatccctgggctacctgacttgccggtttcccgttctcatcgagagtatcgtcaatacggacaatttcattcttatacatgctgaaattagttccgagtgtccaggtaaattctttcatacgtaccacatcaccatttaaagaaagatcgataccgctggattttgtctttcccagattatctagcatggtagtatatccgagtgacgcattcagggaacgttttaccaacaaatccttcgtatgagtattataatactcgaccgtaccattcagacgcccattgaagaaactaaaatcaagaccaaagttagctgttgcagactgttcccatttcaagtttagattagaaagttccttgcccggcaaatatcccatttgaaaaacatctccaaactcatatcctttattatcagccagtcccaaagtagtataattaccgataccattctgattacctacaataccataactcacacgcagtttcaggttatcaatccacgacacatctcttaggaaactctcctgattgacacgccaggcaaaagctgccgacgggaaagttccccatttattttcttttccgaaacggctggaaccgtcacggcggacagccacgttcaacaaataacgatctaaaagtgaatattgcgcccgggccatgaacgacaccaagttattttcattaaactgacgacggggcttgcctgtaaactcaccttgagaaatgaagttccagtctttatccaccggaagattctcaaccgagtacccgatagacttcgaaccattatggtcgacagactgaacgccggtcaatgtcaactggtgtttcttgttccggataggcactttataggtcacaatattctcaaccagccagttctgtgtacgcgattcgtcaagaacggccgttcctccgcctcccggatattgggaatctttataagaaccgtcttcagacgtctgattataaacagaagtattcagacgataattgaatcccttgaaaggtttcacatccataaaaaagttcaggcggtaattatcacgagttacttcacgtccataatgttcggcacggtacaaaggattataatttccttccgagttgatatattttgtatacttgccatccgcatcatatatctccgccaatggagaactggtaataaaatcattaaagttaccatcctcacggtcttgttttgtcatcgcataagaagaattgataccgaaactaatccatttggctatttcaaagtccagattcagtcttaaagaaaacttctgataccccgatccggtaaccaccattccttgttggtcaaagtagttggcacctgccgatactttgattttttctgttcctccacgtacactgacgtcgtgattatgatagattgcatttctaaacatttctttttcccagtcgataaactttccgctggcccatacccgttgcatcacctcgtcttccaacgcttcggctatagaaatctcacgcgcatcaattattcctttatcatgcgcctttgcttcacgacgaagctgcatatattcttcgggagagtagaaatcaaaatttctccagagagattgaatacccagatagccattatagttgacttccacttttccggctttaccacgtttggtagtcaccagtaccacaccgtcactggcgcgtgcaccataaatagcctgtgacgcagcatctttcaggatttcaaccgattcaatatcatccgcactcaacgtactgaactctgttgcactggaaggagaaccatctataatatataaaggtgcattgtccgcactgatagaacgggaaccacgaatggtaatcgaaggagtcgatcccggccgtccggaactactcgttacattcacacctgcggcacgtccacgtaacatatcagccacattgccggcgggaaatgttttcatttcatccgctttgaccgaagctaccgaagtggctacatcactcttacgctgaactccataaccgacaaccaccaattcatcgagcattttcgactcttccaccatattcacattcagcaccgttttcgtaccgacacgtattttttgttccttatatcctatacaagaaaaaacaagggtagatttagccgatacactgattgaatattttccatttacatccgtcactgtaccgttagtagtcccctcctccatgatattagctccggggatcggtccaagtgcgtctgtcaccactccagaaactctgacgttttgagcactaacctctaaagagataagaaaggctgtcaggaacacagcccatttaattacgatgtttttcatactatgtaataatttgaatgattacagtgcaaaaatcccaattattaatgatttcgaataatagaatcgtccgtataaaagttcaaatagtacaaatctcgtcaggcagaaagtatataaaacactataaattaagagtttgtatatttccgtctataagcagccggagtaatttcataagcatttttaaagcaccggataaaataacttggattagaaaaaccgtaatcaaatgctatatcagcaatcagggcattggggtcattccgcaatttttctgttgcttttttcagtctcaaagataaaataaagtcattcggggtctgtccggtcaatgctttcaatttagtgaaaagcaacgttctgctcatacacatttctcgtgcaaaagtagctacgtcaaagtctgggttatcaatataagattccacaatcgccgtagcatccatcaacatctttttatcgatcggattgaacggaaggtcttccactttaggttcgtcgtttcgaacaaaccgctgttgaagtagtttacgagtctggatgatattgttacaccgggctaccaatatcttgatattaaaaggtttggagatataatcatccgcacctgtctgcaagccttccaaggtgtgttcttcccggttacgggctgtcagcaagacaacaggtatatggctggtctgcaaattacttttcaacttctcgcacatttccagtccggacatgacaggcatcatgatgtcacttacaatcatctgcggttggagcgaagaagcccgttccaatccttcctgcccgtcagcagccgtatatacctcatatatctgttcaaaaatctgcgtcaataccttacgcatttccgggttatcttctacaatcagtattttcaccgttttatccggcttcaccatttccgagatttcttgaggctctattatataatgttcggcaacgtgctcgtctgcggaggaagagacttccatattcatattcgcatcccggtggagagtaacggtaaaagaggtaactccattcagttcgctttccactccgatggttccctgatgcaactctacaattcctttcgccatcgccaatccaatgcccgatcctttgacagttcgtgtggttgttgccgaatcatcctgccaaaaccgttcaaatacatgtttgatcttggatttatcaatgcctacccccaggttgttgactgaaatcacaatgtcattatctccttccgctgacagctcaacagaaatccagtcaccaggcttcgtatacttaaaagcgttggacaataaattatagaaaactttctctatctgtgttttgtcaatatacaaatcagcttctttcagagtggaagaaaagcggagatctatcttattcagttgagcataactatagaaagagccacaaatttcctctatcaccgccacaatattctctttagaaatctttagtttcaagtatccctgctcctgcttgcggatatcaatgacttcatccacgaggttattcatccggcgggaatttttataaatatccagaatcttattatatacttcaggaataatgtccttatgcatcaggagcatttcgagctggctggatataagtgttaacggagtacggaattcatgcgatacattggtaaagaaacgcagtttggactggttcacactttcgatatactctttttcccgtttctcggccaataaagagtgccgcaaggtttttcgtatccagaacatacggataatatagccggcaatgaggatagctgccagcaccatcagcaaaataaaccatgcccgctgataaaccggagcctccactatcagctcaaaactaacggaaggtgcttcctgaccgtgaacgcccacctggtcgccacggacatggaaagtataatgccccggatgaagattggtataggtaatcatcgtattatcgcccgccttcatatattcgttgtcaaagccttcaagtttatattccaggccgatattagaaatattattcagggtgttacttgctatctcaaaagtgacggaagaatatctgggcggcaatactaaccgatgttcatacagtacggtttctttgataagccccaacgaatcaagcggttgtatttccgtattatccacaagcacccgttttacaaacacatcatagtcaacagactgtttgttcaacttttcctgggcgatagagacaatacccgccagaccacacacgtaaatatcgtggtcggacgcaatataaagccctccatcatttacattattcaagggaaaatcactctgtctgttatagttctcgaatgtagtcattgccaggttgaatttagagaaaccaccattggttgccacatagatagaaccatccaaagggctctccaccaatccggttataaatccattttctaatccctgtttcgctccgtatcccacaaaagaatttgtcttcttatcaaatagataaattcccgagcctgtcgatcccagccatatacgtcctttcttatcacataaaatgtggttgatgtgatgctgcgctgtgctctgcgctatttgggagaaaggataactatgggcagtgcccgctttgaggttgactcgtatcagatcaaaagaggtagtcagccataaatccccgtctttgtcaaacgtcatatcccaaacctgcgacagatgtttggcagccaacgaagggtgttcgaaatgatgaagtcgaaggtgtttcttatccaacacaagcaatcctcccttggcagctatcaataaagaatcgtggccggcaaactctatcattttcaccagattataggctctgtcaacaactgtttttccttccggagtatagatgttttccgagatagattctatatgcccggtcgacagattaatccggttgattccctgataaagagaagctacccaaagataatccggctctttctcataataaagagacttcactatcttaaaagaaagctcttgagaatagaccttttttaaagggaaaaagcgtttggtatgtttatcataatagttcaacccgcttccttcacttgcaaaccagatccgtccggaacggtcttcggcaatggaactgataatataagaattcaaatgaccgccaacagccgtagacgagcggtaaaaatggaaagcatcattcgctacattataatattggattccctgataaaaagtccccaaccataaagtccccgaagtgtcgtaatgcatcgaaataatagaacgtatatcggccgcctccacattcaagtcatattcataatctgtaaactctccggtaaacaggtttaaagtctgcaaaccggcataggttccgatatacaggagactatcattagcttgcgtcacatgacgcacattattatggttaatcgtattttcagctaccttattatgtttgaaatgagtaagttttccatcttcatccaaccgtatgagccctctgtttctggtagctatccagatacttccgtttctatcttctgttattgaattgacagctcccacatccatacgtcgggtgatgtgtgcagactggtccatacaatatatccctttggaggaagtacccaccaccactgtctgattctgacgaaccatgagactgttcatcaatacatcctcctcatccgaaggaaatgaaaagaataactcgggcgcctggtcgaggttgcgataacggtagatttcctttccggtagctatccataatgcatcgtgcgcataacagattcccgcaacttctccttcacgcaacaccctaaaacgattcaaacgcatatcataaagagtcacgctctgcaaactgcggataaagagcaatccagctttatttccgcaaacctgcctgatattattgatattgatggaatagggattggcattatccggtttgaatacttcaaacttacgtccgtcaaatcgattcagcccgtcttgagtgccaatccataaaaaaccgaattcatcctgatagaaacaattgaccgtttgatgagaaagcccctgccttacgtccttaaagcgcatattgatatccttcgtcacatttgccatgcaacaaagtcccgatatgaacaggcaataaacaacaagaaatttagctttggccatctgtgtttttcgataatttagatgcaatattcgggaaaatccaagatatatgcaagcgtttattcaaaaacctgattgcctattgcctacagactattactcggaaggcgtatgactaatctccctatcgaataaaattaatcgtctgacagttgattctttttcgtctgacagtagtcagacgaaagttcaacagtagtcagacgcaagtttgacaactgtcagacgattaattttatgcataaacaagattagttatctctttaccaagaaatagtttttagcatacgaaagattaaattatactatcaaccgcctaaacacttgtttatcattggcgaactgcgtacttttgcacgccattaaaaaaagcaaaacaatgaccaacaaaaccaaaggttttatctatggagcgattgccgctgcgagctacggtatgaatcctctttttgcacttccgctctatgcagccggaatgagtgtcgataccgttttattctaccggtacttctttgcggcaatcgtattgggtattctgatgaaagtgcagcatcagtcttttgcacttcataaggcagacgttttgcccttagtcattatgggattgttattctctttttcatcactgcttttgtttatgagctataattatatggatgccggaattgcttcaacgattctgtttgtttatccggtgatggtagctgtcatcatgggaatattcttcaaggaaaagatttccgccattaccgttttctccatcctgctggcactttcaggcattgccttgctttatcagggagacggcaacaaaccactatcgactttgggaattatctttgttctgttgtcttcactctcttatgctatatatatagtaggtgtaaaccgttcgacattgaaaaacctgccgaccacgaaacttaccttctatgccattttgttcggactatcggtttatatcgtccgtttaaatttctgtacggaactgcaagtaataccgtctgcctggctctgggccgatgtattatcactcgccatcctgccaactgccgtatcactggtctgtaccgcactggccatccattatataggctctacaccaacggcaatattgggtgctttggaaccggtgacagctttattcttcggtgttctcctgtttcacgaaaaactgactccccgcttaatgatgggtattttaatgattatcaccgccgttaccctgattatcattggcaagtcactcataaaaaagatgggtatgctgttgcagatgaacaaaaaataatatacttttgctacttaatcaatcaaaatgcaattttaaatctcaaaaaatatggtagacgtaaagacttgccttgacaatgcacaagaaaagatggatatggccatcatgtatctggaagaagcactggcacatatccgcgccggaaaagcgagtgcacgcttattagatggtatccgcgtagattcttacggaagtatggtacctatcagcaatgtagcagcaattactactccggacgcccgcagtatcgtaatcaagccttgggataaaagcatgttccgtgtcatcgaaaaagcaatcatcgactctgacctcggtatcatgcccgaaaacaatggagaaatgatccgtatcggcatccctcccctgacggaagaacgccgtaaacaactggcaaaacagtgtaaaggagaaggcgaaacggctaaagtaagcgtacgcaacgcgcgtcgtgacggcatcgacgcactgaaaaaggccgtaaaagacggattggcagaagacgagcagaagaatgcggaagccaaactgcaaaaaattcatgataagtatatcaaacaaatcgatgatatgctggctgaaaaggataaagaaattatgaccgtctaaaaaataatgaagaattaagaatgaagaatgaggaattataatgctgtattattcagttgaaacacagcctgaattcttcattcttcatttttaatttataatttatatgaaaggattagtaatcaaaaacacgggtagttggtatcaggtgaaaaccgatgacggacaatctattgaatgtaaaatcaaagggaatttccggttgaaggggattcgcagtactaatcctgttgcagtgggtgatcgtgtccggattatacttaatcaggaaggcattgcttttatcagtgaaatagaagatagaaagaactacatcatccgccgctcgtccaatctttccaaacaatctcatatccttgctgccaatctcgaccagtgtatgctggtggtaaccatcaattatccggaaacttccactatttttattgatcgctttcttgcatccgcagaggcctatcgcgtccctgtcaaactggtatttaataaggtagatgcttacgacgaagatgaactccgctatctggacgcccttatcaacttatacacacaaatcggctacccttgcttcaaagtttccgcaaagaacggcactggagtggctgaaatcaaaaaagcactggaaggcaagattactttattttccggacattcgggagtcggcaaatcgactcttatcaattccatactgccgggcatagcagccaagaccggcgaaatttcttcttaccacaacaaaggaatgcatactactactttctccgaaatgttccctgtggaaggagatggctatatcatcgatactccgggtatcaagggcttcggcacattcgatatggaagaagaagagatcggacattattttcccgaaatattcaaaacctccgccgactgcaaatatggcaactgtacacatcgtcatgaaccgggatgtgccgtacgcaaagcagtggaagagcacctcatcagcgaatcccgttatacctcttatctcaatatgttggaagataaagaggaaggaaaatatcgggctgcttattagaaaaaatgcgagcagcgtgcttataaaaccaatgctgttcacacttatagttataatagtacacacaaaaaaacaatatgaaaaaaatcttagttttattatgtttcattttatacataatttccgcacatgcacaatattgcagtattaaaaaaggaagaactgcttactatgtaacaaccgaagtaaaggaaggaaaaacactgaaagatactatgtgcatcgcagacgtggttgataaaggtgatcgcttaatcataagagaagatgctttcggagagcactatgattctctaagtataaaaagtggtatcaacaggttattctatatttatcataagagtcaagatatgaccgaagttatccttttggatggtaaatcagaatatgaatatcagaaatattctaagaacatatatgcagaaggacgaattagcatacctttaaaggatcatgttcagaatggagatgatataccacagtgtaatttcttgcaaaaatcaggaccaatgactatgaaagcttctctaaaaggaaaatataaaggacgtgaaaccatacatactcctgcgggagattttgattgcattaaaatctacacggaacaaaaaggaaaagtcatgttcatttcagaaaccgaatattcaatagactggtatgccaaaaatattgggctggtaaaatcagaaactatcactaaaaaagggaaagtcttgtcaaccacccttctatatgccataaaagaatagttcccttaagtgtatgagcttattaaactgaaaaagatgcattaactttttttctatcatttacagattaaacctttccagtcagggaaagtctaatcttcaaagattatattataattgccatatacaatactaaaccatgaataagaagactaaatggggcatcattattcttgttggtgccgggattatcggtggaggaatctactcacaattaccgaaaaaaaacgacgaactagcagccgccgacaaagtgatgggcggtaataaaaaaagaggaaaacaagttttaaatgtgaacgccaaggtcataaaaccgcaatctctgacagatgaattcaccactaccggtgtacttctgcccgatgaagaagtggatttgtctttcgaaacgtcgggaaagattgtagaaatcaactttgaagaaggaacagccgtaaagaaaggccaattactagccaaagtgaatgacagacagttgcaggcacaattgcaaaggttgatttcgcaattgaaactggcagaagaccgtgtattccgccaggatgctttattgaaacgggatgctgtcagtaaagaagcctacgaacaggtgaaaacggatttagcaactctgaatgccgatatagaaattatcaaagctaatattgaactgacagagctacgtgctccgtttgacggagtgatcggacttcgccaagtcagtatcggtacgtatgcgtctccgaccacagtcgttgccaagctgacaaaaatcgctccactgaaggttgaattttccgttccggaacgttatgccaagcaaatcaaaaagggtaccaatctcaatttcagcgttgaaggaacattggatgcttttggcgcacaggtatacgctgtagaatctgccatcgatccgaatctgcatcaatttaccgcccgtgcattatacccgaatgtcaatcgcaccctacttcccggccgttatgccagtgtactgttgaaaaaggatgaaatacctaatgcaatagccatcccaacggaagcaattgtgccggaaatgggtaaagataaaatctatctgtataaatcaggaaaggccgaaccggtggatatcattactggtatccgcaccgcatctgaagtgcaagtgattagaggattgcacgtaggagacacaatcatcacttcaggaacattgcaactccgtaccggactcgccgtaacacttgacaatattgaagaatgagaatttatgatttatgaattctgatttatgatttataagccaaataatttatgatttataagtcagcaaaatacagcaaacattcagaaatcagaaatcataattcaaaaatcagaaatcagaaatcttcaatccataactcagaaatcataattcagaaatcagaaatcataaatcaatgaacatctccgaattaagtatacgtcgcccggtattagccacagtattaacgattattatcctccttttcggattcatcggatacaactatttgggtgtccgcgaatatccgtcggtagataatccgattatttctgtcagctgctcttatccgggagctaatgccgacgttatcgaaaaccagataactgaaccgttggaacagaatatcaacggtattcccggtatccgttctttgtccagtgtgagccagcaggggcaaagccgtattacagtagaatttgaattgtccgtcgatctggaaacagcggccaacgacgtacgtgacaaggtttcacgtgcccaacgttatctgcctcgcgactgtgacccaccgacagtttcaaaagcagatgccgatgccatgcctatcttgatggttgctcttcagagtgacaaacgttctctgttggaattaagtgaaatagcggatctgactgtgaaagaacaattacagactatttctgatgtaagtagtgtatctatctggggagagaagcgttactccatgcgcctttggctcgacccggtaaagatggcaggttacggtatcactcccgtcgatgttaaaaacgctgtagataacgaaaatgtggaacttccttcaggtagtatcgaaggaaataccaccgagttgacgatccgtacactaggattgatgcataccgcagatgaattcaatgacttgattgtcaaagaagagaataaccgtattgtacgattcagtgatatcggacgtgctgaactggggccggctgatattaagagttatatgaagatgaacggcgttcctatggtgggtgtcgtagtcattccacagccgggagccaaccatattgagattgcggatgctgtataccaacgtatggagcaaatgaaaaaagacttgccggaagatgtacactataattatggttttgataataccaagtttatccgtgcatctatcaatgaggttaagtccactgtatatgaagcttttgtactcgtaatcatcattatcttcctcttcctgcgtgactggcgcgtcacgttggtgccttgtatcgtaatccctgtttcccttatcggcgctttcttcgttatgtatctggcaggattctccatcaatgtgctttccatgctcgccatcgtactatcggtgggactggtggtagatgacgccatcgttatgacagaaaatatctacatccgtatagagaaaggaatgaccccgaaagaagcgggaatagaaggagccaaagaaattttctttgccgttatttccaccactattacgctggtagcggtattcttccctatcgtctttatggatggaatgacgggacgattattccgtgagttcagtatcgttatttcgggttcggtgattatatcctcatttgccgcattgactttcactccgatgttggcaacgaagttactcattaaacgggaaaaacaaagttggttctatgcaaaaacagaaccgttctttgaaggaatgaaccggctatacagccgttcgcttgccgcttttcttagtaaacgctggatcgctcttccatttactttcatcaccatttgcctgattggtattctgtggaatgcagttcctgcggaaatggccccacttgaagaccgttcgcaaatcagtatcaatacacgaggagcggaaggcgtcacctatgaatatatcagggattacacagaagacatcaatcaactggtagactctattctgcctgatgcagaggctgtaactgcccgtgtatccagcggtagcggaaacgtgcgcatcacgctgaaggatatgaatgaacgtaattatacccagatggatgtggcagagaaaatatcaaaagcggtacagaagaaaacaatggcgcgttcattcgtacagcagcagtcttctttcggcggacgtcgtggaagcatgcctgtacaatatgtacttcaggctaccaatttggaaaagctggaagaagtgttgcccaagtttatggctaaagtatatgagaatcctgttttccagatggcggacgttgatttgaagttcagtaaaccggaagctcgtattcagatcaaccgcgacaaggccagtattatgggggtaagtaccaaaaacattgctcaaacgctgcaatatggattaagcggccaacgtatgggatatttctatatgaacggtaaacaatacgaaattcttggtgaaatcaaccgccagcaacgaaacaagccggccgacctgaaagcgatttacgtccgcagcagtagtggggatatgattcagctggacaacttgattgaattggaaagtggtattgcacctccaaagttgtatcgttataatcgttttgtgtcagctaccatctctgcgggattggcagacggcaaaacaatcgggcaaggcttggatgaaatggataagattgccaaagaaacattggatgacactttccgcactgccctgtcgggagactcgaaagaatatcgtgaaagttcctccagtctgatgttcgcctttatcctggctatccttttgatttacctgattctggcagcccagtttgaaagtttcaaagatccgttgattatcatgttgacagtgccgctggctattgccggagctttggtcttcatgtatttcggagatattacgatgaatattttcagtcagatcggtattatcatgctgatcggtctggtggcgaagaacggtattcttattgtagaatttgccaatcagaaacaggaagccggagaggataaaatgagcgccatcaaagatgctgcccttcaacgcctccgtccgatcctgatgacaagtgcctctacggttttgggacttatcccgctggcatttgccaccggagaaggttgtaaccagcgtattgccatgggtacggcagtggtgggtggtatggtcgtatccactctgcttacgatgtacattgtaccggctatttacagttacatttcgactaaccgaatcaaaaaactacaagaatgaaacagaaaggaatctgcatgaaacgcatcatttatatcaccattgcatgtgccttcttatcagtctcttttgcaaaggcacaagttctcactctcaaggagtgtctggaagaaggattgcaaaacaattactctttacgtatcatccataacgaagagcagatcagcaaaaacaacgcaacattaggaaatgcgggttacctgcctacactggacttctctgccagatataccggaaacctggacaatattgagaccaaggcgcgtgctaccggagaaataacaaagaacaacggagtctacgatcagacggttaatgtcggtcttaacctcaactggactattttcgacggattcaatatcagtaccacctacaaacagttgaaagagctggaacgtcagggggaaaccaacacgcgtattgccattgaagattttattgctgccctgacttccgaatactataattttatccagcagaagatccgtctgaaaaactttcattatgcaatgtcactttccaaagagcgcttgcgcatagccgaggctagtcacctggtcggtaagttttcagggctggattatcagcaggcaaaagtggatttcaacgcagacagtgcccaatacatcaaacaacaggaattgctacattcttcacgtatccagttgaatgaactgatggctaacaacaatgtcaatcaaaacattattatcaaagattccaccatcgacgtacacagcgacttgcaatttgatgatttgtggaattctacgttagcaaccaatgcttctttgctcaaggccgatcaaaacacggtacttgcccaattggactacaagaaaataaactcacgcaactatccatatctcaaattaaataccggatatggatatacgttcaacaagtatgacatcaacgcaaacagcagaagaggtgaactgggctttaatgccggaataactgtcggttttaatatcttcgacggtaatcgtcgccgcgaaaagagaaatgcaagtctggctttcaagaatcgtcgcctggaacgacaggatctggaattagcacttcgctctgatctcagtaacctatggcaagcctatcgcaacaatctccaactgctgaatctggaacgtcaaaacctgataaccgccaaagacaatcacgatattgccatggaccgttatatacagggggacctctccggttttgaagtacgtgaagcacaaaaaagtttgttagatgcagaggaacgcatcctttctgctgaatataatacgaaactttgcgaaatatccctgttgcaaatcagcggaaagattacgaaatatctggaataaggaagtagtttccatttattttttgattgggttaatcttcttatcgggagggttaacccaatttttactgtataaaaaacagttattacatatcgatgtttttctttcttcctacatttgcatactataaaaacattaaataatacaagccatgagaaaactaagtcttttcttactgctactttttatcctgacaaacgcctcagcccaaaaagcaacagattacagaaaacaacagaactacaaagaatgggtacacatcgcccctaaatttgacgatgatttcttcaagacggaagaagcccaacgcatcggtgacaacgtgttactctatcaacaaacgactggaggctggcccaagaatatctatatgccggcagaactgacggaacaagaatataatgcggcactaaaagctaaagaagataccaaccaaagtaccattgacaacaatgccaccacgacagaaatagaatatttgtcacggctttatctggctacgcaaaaggagaaatataaagaaggagtgctgaacggtattcaatatctgctcaaatcgcagtatgaaaacggtggatggcctcaattttatccgcgtcccaaaggttattatgtacaaatcacctacaatgacaatgcaatggtgagagtcatgaatcaacttcggagcatatacgaaaagaaagctccgtacactttccttcctgacaagatctgtgaacaagcacgtaatgcatttaataaagggatagagtgtatactcaaaacgcaggtgcgccaaaatggagagttaacagtgtggtgcgcccaacatgaccgtgtcactttggaaccctgcaaagcacgtgcctatgaactcccgtcactaagcggacaagagtctgacaacattgtattactgttaatgtcacttccccatccatctgcagacgttgtaaaatccatagaaggtgctatcaaatggttccaaaagtctgaaataaaaggaatacagaaggaatatttcactaacagtgatggcaaaaaagactatcgcatggttccctgtgaagactgtcctactctttgggcacgtttttatgatctggaaacaaaccggccttttttctgcgaccgtgatggcattaaaaaatatgatatatcggaaatcggacacgaacgccgaaatggttatagttggtataacaaagatggaagcaaggtgttgaagagatatgaaaaatggaaaaaagaacagaataagtaatcataactgatgaaagtttgatgtttacattgcaaaagtaaatatccgaaaaatcgttaagtccttaaaataagaagaggggctgtctaacaataaaatagtcagacagcccctttattaattcaaggcatttacagcctcttcttatagttttatcccaacaggtatcaaccgattattttttgcaattccacggtttcaactgtttgaagaagtcgttacccttatcatctaccaaaataaatgcagggaagttttctacttcaatcttccagatagcttccatacccaattccggatattccacacattcgatgctcttgatgttgttctgtgcaaggatagctgccggacctccgatagaaccaagatagaaaccaccatatttctgacaagcatctgtcacctgctggctacggttaccttttgccaacatcaccatgctgccgccatgactttggaacagttctacataagaatccatacgtcctgccgtagtaggacccatagagccacacgccatgccttccggagtttttgccggacctgcataataaataggatgatccttaatatattgtggcaagtcttcaccgcggtccaaacgttcttttagtttagcatgagcgatgtcacgacctacgataatcgttccgttcaatgacagacgggtagcaaccggatatttagtcagttctttcaggatttcaggcatcggacggttcaggtcgatcttcacaacatcaccttcacctgcctgacgcagttcagccggaatcagttcacccggatttgaatccagtttctcaatccagataccttccttatttattttacatttgatgttacggtcggcagagcaagatacgcccaaacctaccggacaagatgcaccatgacgaggcagacggatgatgcgtacatcatgagcaagatatttacctccgaattgtgcccccaacccaatcttgtgagcttctgccaatacttctttttccagttcgacatcgcggaatgcacgaccatattcgtttccggtagtcggcaggttatcatagaaatgagtagaagctaatttcactgtcaacaggttcttttcagcagaagtaccacctatcacgaaagcgatatgataaggaggacaagcggctgttcccaatgttttcatcttttcaaccaggaacggaaccaatgtaccgggattcaggatcgcttttgtttcctgatacaaatatgtcttgttggcagaaccaccaccttttgttacacaaaggaattcatattccataccttcggtagcttcgatgtcaatctgtgcagggaggttacattttgtatttacctcatcatacatattcagaggcgcattctgtgaataacgcaggttttcttcagtgtatgttttatatacgcccagtgaaagcgcttcttcatcagaatatccagtccatacctgctgtcccttttcaccatggataatagcagtaccggtgtcctggcagaatggaagtacaccttttgaagcaacttctgcgttacgcaggaaagtcaatgccacatacttatcgttttcacttgcttccggatcactcagaatcttagcaacttgttcgttgtgcgaacgacgaagcatgaatgatacatcacgaaaagctgcattagccatcgcagtcaaaccttctttttcaattttcaggatgggatttccttcaaactcgcttactgatacatagtcttttgtaagcagataatactcagttgtatcttttcccttttcaaacatgggctgatacttaaacggaggtgttgccataagtttcttattttattacgtaatgttagttagtgtggcaaaggtagtaattaagaatgaagaatggcgaatgatgaatgaagaattaagaatgaataacggagaaaagcaggaacagcaaaagacaatcataaactataaacaacgagcggtaaacaagctatgccattcgttgacatctgccgttcaccgctcactattttatttacagtttgctatttatcatatcctgtttatcatccacagttcgccatctgccactcctattatgattcgattgcttcaatccgtttgattaactcgtttccaagagctgttttatcttcaatatgtttcaatactgctgtcacaaaggtattgctttcgaaatcaccgcgtacctgctcaaaatccagcttcatttcatcgtgagaaccatcagcaccgaatccagtcatggaagacaatgaaaattctttcttggcatcctcatataccatcttatccaatccgacaacagcttgctgccacgctttcacgataccgatgatatcttgtgccgtaatcgtttccggatctaagccataaaattcctgaatcttatgataagcccatgtccattcataggtataataattctcgtgcatttccgcgaaacttgcattgatggatttcaaacgattgactgttccattctcaataccatccaacaatcggtcgatttcactcttgggagcaatcagtccggaaacatccacccattcgccaagtccgatttccgtgtcaggtttcagtcgctgacggatttcttcattggtctggaaattaataccctccaatcgttttatgatggagtttcccaagaacttgtgaatggcgatttcataaaaacgaattccgttattcagagaagagttcttgattttagcactctggtaggagtagatctctgaagtttcaccggatacacgtttcaattctttcaaaatggaacgtcctttaaacatcttctgaatggtataaggactcagcaggttataattgatataatccagccggttcggatcttttcgcttatcacgctttggccatttctgtgcgtcacggatagtacctacacttctcaaattaactcccggaacaagataagtggtattccgctgctctatcaggtaagagaaaggaagattggaagtatcggcatgattaacatgacgtcccattaccaaagagaaagccccgacacgtgccggccacaggatatatgaatcggaagtggtcttcgctcctctctccatcgttccctgatggataggacctaacttatacatgtgattactctgattggaccccgaacccgcattcataaacgagaacataccggcaatcaataaagtagatttatggtgtgtcacagtgaaaggacctgcaaaaatagcacatgcctcaccgttctctccctgacaattactgaagaataaagaatcggaagcggaataattgtgtcccagtttacaggattgtccgacgaaacaacgagtcaacatcgtgccgtcatccactttagagccggaagagatgataaagtcatcacagattacaccatgtccgatatgtacaggtgccgtcacattactattgacgctgccattggataagcggcaggtcccacagatatggcagtaatcaccaatccggacattcttgatcgagcccgtattgagaatcatcacatgattgccaatactgccgacagcagaagcatgtttattggaataataatccgcaatagatttcatacggtttatcagctcgggacgatggcggtacagtgcaagaatatatgcctggtgcgcagacaatttatcgttcatcaacacctcacggcctcctgtttcattcaagacagccacttctaccccattaccaaaagtgcttaacctatccactaaaataatatctacattctcaatgaaggtgtcactgccaatctcataattagcaatatagttctgtatattctcaatacagcagttatcgcccaccgacacattgtgcaacgtcacatgacgtaatcccgaatgtttcttgattccccccggcaatgtaaattcagcttcgaatacccccagttttacttcacccgagaaacgggtatgatggacgtactcacaattaaaaccctctgccactgatacatttccccaatcatcggccagacatgactggctcttcaactgaagtatctcatcttcagtcaatctacgatagtctttcatcttaataatgtgttaatgtgcccatatgccaatgtgccaattctgatgcagtacgcgcaaccaattggcacatcagcatattagcatattgattattcttcctcttcttcttcgtaggtctgataaagaaaatcgttatagggatatttctgaacgtgtaattctttcactcgctgataaactacatttttcagttcgtctatattgattcgttcgcgggcggaaataaagaggcagttatcctccatttttgccatccacgtcttcatcagttcttcgagtgttaagttttcctttgttcggggggtaaggtcgtccggcgctttctccacgtaggtgtaagcgtctattttattaaatacaagtatcataggtttgccactgcctccaatctctgccagggtcttgttcaccacctcaatctgttcctcaaatccggggtgggaaatatcgactacgtgcacaagcaaatctgcttcacgtacctcatccagggtagatttaaaagattctaccaagtcggtaggtaacttgcgaataaaccctactgtatctgacaacaggaacggtagattatcgataatcactttgcgcacagtagtgtctaaagtagcgaacagtttgttttccgcaaacacttcactcttggagagaagattcatcatggttgattttcccacattggtataaccaaccagtgcaacacgtatcatgcgtccgcgattcttgcgttgggtagctttctgcttgtcaatctccgccagacgttctttcagcaatgacatacggttcaggatgatacggcggtccatctcaagctgtgtttcacccggaccacgaagtcccacggaacctttgccaccaccggcaccggaaccacctccctggcgttccaaatgagtccaaagccgctgcaaacgcggcaacatatatttatactgtgccagttctacctgtgtcttcgcattggctgtctgcgcacgcatggcaaatatatcaagaatcagtgaagtacggtccagtatcttcactttcagttcagcttcaatattacgaatctgtttcgcagaaagctcatcatcaaagatgaccattcctacttcacgttctgcttcctcttcgtcatggatatattgtctgatttcttccaactttccttttccaacataagttacagagttagccgtcggcaacttctgtgtaaatcgtttcacaacttccgccccagccgtctcggcaaggaaagccagttcatccagatactcgtttgttttacgctcatcctgcgtctgtgtgatgagtcctacaagcactgctgtttctactttggcttcggatattacaaattctttcattctttacttctattatatataataatgtgggcgcaaatataacaaaaaaaaagaggacaatgttttattgtcctctttttcgtatcatttatggtaattcaattataaatcaaaccatagtttttcccagattttcggagattctttcggtgcattaatattagctgtcatttcttcaggactatattcccatcttctgatcaattcttttgaagttgcatcttccgggacttgcaatgtcggaacctcgtttccggcagtaccagatcgcctccattgtacaaactcctcaaacggacgatccatcaaatcaatccattgctgcatatgaatctcatacagagctttttcctgggtcatcgttgtcaattccggtaaacctgtaacatatgtatcaatatcggattccgcaactccataaaaagcacatgcttcacgaattcctttcaggtacagttcattagctttcgacagattttgagcaactcctaatccgcgcgcataagcttctgcttccaaaagtagctgttcttgacaagaataaatcaattccggagcgtctcttctgaaaaggtagttgcttacaacagatgacagtagattttcttcatcatccgtctttgcagcctctctattacccaacccccggtatacaccatccgcacccggttcaaaataacagggaatacggggatcatcacgttcttgcatcggtttcaacatataattgctagcaaagaacaatatttgtgtccccccaaccaattctataagttcatatttagggttctggttacccggatctgtagagtaaggaaataccaaattgtccgctgctgatgcaaccattcctccagcctgcagcaacgtaccaatagcagcagccttagaagggtctttatctaccataaccatcaatgttctaaactttaaagactttgccaaagtcatccatttgttcatatcacctttgtaatagatatcgtactcatcaattgcattagcatcattcagatctataagctgtaatgcctcatcaagtaatgacaaaacaccattcaatacactttcctgagaatcaaatttcggatatttaattgttccgttccaggattctgtgaaaggaatatctccccacaacatcgttgcctcatacatatgctcagctaaaagaatcttacactgcgcaatagcattgtgattcaccggttctgactcttctgcatttttaatagctaacatcaaattattgccacctacagaataataatgtttccagacattccctgtactataaggagaaatagtatatacagattcatcccagccaccgtaatcaagtccaccatcaacttgacactgcgaactcatagataaaggaatataaaagtcaccaccagtgcgtgttccagcccagtttacagctacatagttaaacaaatacccgggatcaactttctcggcagtattgggatcatggttaatatcgagccaatcgctacatgaagttaaacatgccaaagcgctcaatgcgtatgttaatattttctttttcattatcatattcgtttaaatcttacaatgttaatctgacattaaatccaaaacttctggtagaaggtatgctgttaaactctacaccacccccaatctgagaaggaccgaagaagttagcttccggatcaatatgtggcacatgatctttaataatccataagttacgtgcctcaaaacctaaatccaatgatttaacaaaaaagctcttgaaccatttgcgtgggaagctataagacaactgtacctctctgagttttacaaatgatgcattatagatattcccttcattattactagaattggatatatgctgccaataatcctgcatacttttcacaggaacatcattaggtctatatgttccatcatcctgaaggattacacccggctcaataaaggaagcatcttcacggtgagctattgtttcagcagccaaaccgctacttcttaaattagctacagtctctgaatacaaagaacctccatgacggatatcaatcaagaaactcaaggtaactcccttataagtaaatgtattgttgattcccatcgtaaaatcaggatatacatctcctaaacgcacgttattaacagtttctctcaaacctgttttagaattaatcacataatttccttggtcatcacgtttccaacccgtgccatacaagccaaacgaatctcctttagcagccttaatttgtaaaccgctcagtccactcgttaacgtatattcatcaagtccttcagctaactcctccactgtctgcttatttgaagcaaatgttgcatccaggtcccatttaaaatcacgtgtttccacaggagtcaaccccaaagttacttcaacacctttattggcaatcttcccggcattaatattattggcaaagtagcctgttgacaatgggacatcaatacttacaatctgattctttgtaatattgctataataagtcatatctaacctaatttttccaccgaagaaacgcaaatcagctccaacttcaaaagaactttgattttgcggcttcaaattctcatttggtaagacacgaggtcccgtaaagccaactaatcccatatgggggaaagtgttaacatcacccagatattgcaaaaagtaagtactagcgggagtatatttaaatgccaaattgtacggatcttcatcactacccacattagcataactcaaacgaaccttaccaaaattcagaatatctttgttttccatcaactccgtaaaaataaaactaccacttatggaaggatagaaataggaacgattattgatcggtagagtagacgaccagtcattacgtcctgttacatttacgaaaagcatatctttgtatcccaaactaatatctccatataaaccaacaagacgtttcttttcataataatttaccggagtagtagacttcgcattagtatatgtgtatagcccatcaacaaccagattctgcgcctgcacattttcatttttccattcctcctgatagagattatgccccatcattaccttaaaatgatagtcatttgcaaaagtcttctcgtaagaaaccattaagtcattatttataattcttttatacaaattccaagtctggaactttccgttcaaggctcctacagtcccctttgcatacaccttacgccttccttctgtgtaaaaatctgttccggcattattggtgatagtcaatccttcaatcggtttataagtcaatgtaatattaccaatcatacgatctaaattattggtaaacttattcttattaataatccaatatggattattacttttaccttccggatctaatgttatctgctttccattctcatcaatccaattcttttgaatatcatgtatatcaatagttctaggcaatccgttgatcaatggaatcagtaggttgctatcatttgcaccttgtgccggacgaccttcagaatcggaacgtatatattgagcagaaatacgaccagtgaagttcttagtaaaattcatacccgcattgacagaaaaagcgtatttattgtagtcagaccccggtacaacaccagtctgattagtagaagtaaagctcaagcggaagtcggccttttcaccaccacccgcaactgatacattattaatataactcattccagtttcatagaaatcctttacattatcaggatttgctttcaaagtcactttgtcacctttgtaatctgtaaactgttgatcttgtaccgatgaaatcttcggtccccaaccattcaacattttcacattatatacgccataactaccttgtgcatattcattttgaaaatcaggtaacttcagtacattttcaaatcgtgtagaagagtttactgttacaaataccggagagttcttttttcccttctttgtagtaataacaatagcaccatcctttgcacgcgctccatacaatgcagttgcagctgctcctttcaatacattgatagattcaatatcgtctgaattgatatcccctgcacggttaccaacatcgactataccattagttctgtcaggattataagaaccattgtcaattggaagcccgtcaataataaataaaggagaagaaacggaaccaatagaagaggcaccacgaatctgtatacttgaactaccacctaccgtaccagatgattgggctatttgcagtcccgcaatcttaccagacaatgagttaagtacattactttcacgtgctttagttatttcatctcccttcacactagatacggcataacctagggatttttccgatcgcttaatccccatagctgtcactacaacctcatctagattttgggaatcagactttagcacaacttttaaagttggtttgatcaccacttcttgtgtctgcataccaatatacgaaatctgcaaagtctttgcagaacttggtacattcgacaaattaaaattaccatctacatctgtgattgtacccagagtggtaccttttaccaacacagaagcgccaacaactggctgcccgtcttcttcagaaatcacaacgcctgtgaccttttgagtctgggcagttactaggcctatgcccacaaaaaggcatgccaataacagcattaattttcttttcataaattctctcttaaagtttaactttacattatttgtatctttactctaacaatttgcaaatatattaataaaactgaaactagcaattatattaataaaaaaaggttgcaaatataacattttgttattttacaagctgtatttatgccgataagcatatttttttcaaccaaaagctttgattgctaaaacagcaattgacactttgcataagcaaaatgcctcttttaatatttcttttactcgtttttagtcataaaacacctttaaaagccattctttttgcttttttcgtgaaaaagcgaataaaaaagtggcatttaatttaaagttttgtgaataccaagtgatttgaagatttattttttagagatattaatgcttattcgcctctgatatagcacagaattacgtctaatttgttctattattaattaaaaaatgaaagtatggaaaagatcagttacaaccttgtgtttaacagaaagaagagattgaataaaagaggaatggcattagttcaggtagaagcctatctgaacaggaaaaagatgtatttctccaccaaaatatatctcaaaccggaacagtgggatgccaaacgaaaaatggtgaagaatcatcctaatgcgaatgttttgaatcgtatgttatatgaaaatatagcagctattgagcaaacagaacttggactatggcaacagggaaagtccatatcgttagatttattaaaaaattctattgataaacctctaagcaatggaaggtcgtttttgactttttttaaagaggagatagccaattcttctttgaaagaaagtacccgtcaaaatcacctttccacgcttgaattacttcaggagttcaagaaagaggtattatttaccgatttgacatttgagtttgtgtcttcatttgataattatctgcaatctaaaggttatcaccttaatactattgccaagcacatgaagcatctgaaacgatatattaatgttgcaataaataaggagtatatggatatacagaagtatgcctttagaaaatataaaattaaaagtatagaaggaagccatacacacttagctccggaagagttacacaaatttgagaatttgcagctgactggaagatatacgagactgcaaaaaacaaaagatgcttttttattttgctgttatgctggattacgatattctgatttcactaatctgacctctgcaaatattgttgagttccatcaggagacttggataatatacaaatctgtcaaaacaggtatggaggtacgccttcctttatatttattatttgagggtaaaggaatccagatattgcaacgctataaagatgacctcaatagttttttcaagttgaaagacaattctaatattaataaggaattaaacatattggcaggcttggctaaaattgataaacgtgtatcgtttcacaccgcccgtcatacaaatgctaccttattattatataatggtgccaatataactactgtacaaaaactgttaggacataaaagtgtaaagaccacgcaggtatatgcgaatataatggatattacagtggtgcgtgatcttgagaaaactgcctcatcaaaaaaataataataagcacaaaaactaaacgaaagtgttctgtttttaagatttggttatagaaatggaaggtataattctctctaatagaagaacagtgtgtataattaaatgaaagaatatgcaatataagttccgaaaacgcatatatataatctaaagatacatcataattacgaatattatcactcgtcccatttaaaggaataaaacgttcctttaaaaggaacgagtcattggtcgtagagaagcccttgctttctttaaaaggaaaggattaaaagctaatttataaacttgacagcctctaatagctattaaaatctggcatttggggttctttcattttagcatcagataaatgataaatacctctttttgcataattagatgtaattacacaatctctttgatacagaaaaagcatataaccatccaaaataaaaacacatcaatcatattctctgcgattttggaggatatttgaatccacccctgcatattttaaaatatacagtaataaaatatgcattttttcatctggagtttttctttttcttagattaccgtttgctaatgaatatattattatagtcaataattattggatataatttagaacaagaaaaccatcttcaacagttaagatggaaataagttttagcttatatcatataagataagaacttaaataattaattaatagatggttatgccctatttttgatagaaatctggtatcataaatcagtaaattaatatgtttggtaggtgcttaatatattgataatctgcataataactacaacaaaaatttatttccgaaggaaagcaaacatcatatatattgttagtaatcaacatattatagttgtatttagttctgcaaagactttgcagatttcgtacatcggtatgcagacgcaggaagtggcgataaagctcaatttgcgagtggttctcaaatctgatgcacagctaatagatgaggttgtggtaaccggatatggggtaactaaaaaagcggcatttacgggatctgcccaaacggtggataataaggacttgatgaaaaaaacagatgcaaactttatgaagtctttggaaggatcagtagctggtttacaagtaaatagcttgactggacaacctggtgcatatgcttctactactattcgtggggttggttcaatgaactctggaactgaacctttatacgtaattgatggtattgccatttacacagacaaaatgggggcttataacaaagccgggacaggggatatggcggcaagtccgatggctaatatcaatcctaacgacattgagtccatcacagttttgaaagatgctacagctacagctatttatggagctcgtgcagcgaatggagtaattgtagttactactaaaaaaggtagtctgggaaaagcgcgttttaatgtgaatgcaaaagtcggaactagttttgtaggtaagatagatcataattatcgtacgacaaatctggataaatacaaagagatctggaccgaaggactaacaaatgcaggatatgacggtgaggatggcatgacttctgctgaatggctgaatgcctatgttatggattggtataatgtggacttgacgcaaaatatcaagagtgtggattggctgaaggagattctgcaaaatggtttttcacaagaatatgatatcagtgctcaaggtgggaatgaaaatttgcgctattatattagtggaggatattttcagaacacaggtatcgtcatcggaactggaatgaaacgctatagcggacgtattagtttagatggaaaaagcgggcggataggatatggactttctgtgaatggagcactctccgatataaacaacactatgactgaaagccaatatactaatcctattgtagcagtatatgacatccgtccgtttgaacaggtgcgcaatgaagacggaacatataatacaaatgttaattataatcctgtagctattaacgataaagaaaaaggtgataaacgcaatcaaaagcagattacattggttgtgaatccatattttacttataatattattgatggcttaacatggaagacaaatgcaggattgagcttgattgacttggacgagttcttttacagttcaatttataatcctcaatattccggtagtggtatgcttggtcaaagaaaccaggaaagagcaacaaccttgaccattaccaataccgtaaacttcaaccgcactttcaaagacatgcatcatttgaatgtgttgttgggacaagaagcacagaaaatatcttatagaacaatttatgcagctgccagtggatatcctagtgatgctgtttttgaattggacaatgcttccaagccaacaggggcgggatcttcaaccaaagcaagcactctttcttcattctttatgaatgcagaatataacttgaatgataaatattatctgtcaggcagtttccgttatgacggctcgtcaagatttggtgtaaacaacaaatgggctcctttttggtctataggagcaaaataccgaatctctaacgaaagctttatggaaaataccaaaaattggttgacagatttgactatcagaggtagttatggaactgtaggtaaccaggatattggttattatgcagcaatgggattgtataattatggatattcttataatggcaaacctggagctattccttaccaaatagccaatccggatcttaaatgggagactgttgcgaaagccgatatcggtatccatgctgttttcttcgaaagactgacactcgaagtagactattataaccaacggacaaaagatatgatatttgatgtaccactttcttacacaactggattcggatctatcctgaaaaatgtaggtgagatggaaaacaaaggtatagaattcttaattaacgctaacgtacttagaaataaagatttcagttgggatgttcgtttcactggtacggcaaataaaaataaaatcataaaacttgctacagaaaaaccaattgagaatactctaactatcagaaaagttggtgaagcgtataatacgttctatatgccggaatatgcaggagtggatcctgaaacaggagaagcaatgtggtataaaggacaagaaggggatgagaaaacaaaaaatgtaaatgaggccggtcagcgaattgtaggttctgccgatcctaaattttatggtggctttggaatgaatttcaaatacaaaggttttgacttctcttttgataccagtttcaccttgggaaataaagtatataactccggatttgcatttgatatgcaggttggacattatttcttaggcccggtatctaactacgtttatgacaaccgctggcaaaagccgggagatataaccgacgtacccaaatttgtagctggagacaactcgggagcagaaactaattccagccgtttcttaatgaatggttcttatttaagaatgaaatccatggttttaggatatactcttccgaagaaccttatgaataaggtggctattgacaatttaagagtttatatctctgctgacaatttgttcactatcactgctaaagattttataggatttgatccacaaaccagatctaccggtatgcagtcttgggcatatcctgtacctagaaatatcatgttcggtcttaatcttagcttctaaaaaaataactttagaaatttatgacaatgaagaaaatattatttgctttattaaccggttggatggcaatttcattcaccgcatgcgatgacttcttgacagaaacgccatcaacttctgttccgacagaagaagccttggttactacccaagattttcagaacgctctaaatggtgtatattacacattaggttcatatcgttttctgggacgtgatgtattagcaattggagatgcgccaacggatatcacttcacattccgttgcaacgtctcatttctatgacatcttccgctatcagatactggatactaattcatacatagaagaaatatgggcatacggatattgggctatcgaccgttgtgcacgtatcattaaagaaggtgcttcatttaaagaagtaacaaagggggatctggcagaagtggaaggatgcatcgctcaagcctatgcaattaaagccctctgctctttctatttgactaacatgtttggtttgccatattcggaagccaacaaaacgacattaggtatcgtaaacgttactgaacccgtccctgcctattcacaggtgtcaagagtcagtgtagaacaaaattatagcctgattcttgatgatataacgaaagctaaagaatattatgctaaagaaggtgttgaaaatgtaggtaaacagtatatgaatacggctgcagttgctgcacttgaagctcgcgtaaaactctatatgaaaaattacgaaggggctattacagcggctcaagaggcaataaccctaagtggtggtacagttgtatcaaccaaagaagactataagaatatgtatacgacattggctgtttcgacagaagacattttctttatagcaaaagccgaagatgattatttgtccgctaatgctctgaatactttatggaataaatacggtttgtctattaacagcgcaacagtagcagaatattcacctaatgatattcggctggcgcttcttggcggtacgtggactggtggaaaaatgcgtggtatcacaaccaataatcagatttctaatttgccagttttcagactgcctgaaatgtatttaatacaggcagaagcatatgcaaaacagtcaactcctaattatggaaaagctaaagaaaagctattggaagtagcttccaaaagaaatccggatttggatgacaatgaaatagcagaggatcaaacggttattgatgccattgataaagaaagaaaattagaactggttcaagaaggacatcgcttctttgatgcaagaagattaggtaaaattattagtgtagcagatggatcgtacactaatttcaacatcgcaaaatttgtgtacccaataccttcttttgaagtcaattcaggttttggagttatacaaacagagggatggagtaataatttacctcgataaaacattttttaatattgcctccatataaggataagttttaaataaatagatgagacctgcaatttcgattaattctaaaattgcaggtcttattatttataaatatatacataagtagttttacgtaagaaacaataattcgcttgcaaaatttcaatgaatgtcatatttaccttgactaataatcaacatttgaatattagtcagaattagtttgttgcaattttcttcatatagtattctcttactaaataaatatcacgcttattatcagataattaagtccattttgggtagagattaagtattacatatatagactggcaataataacgaatttatttaattagctaataattaagcatatatgtatcattaattaagaaaagaaaaagctctccacgcctaaatattagatattacatcattgataatcaataatatacaaaatatttagttctgcaaagactttgcagatttcgtatatcggaatgcaaacacaagaagtagttattaagccaaatttgagagttgtattaaaggctgacgcccaaaagctagacgaagtagtagttaccgctatgggtatttcacgcgaaaagaaagcattgggatatgccgtacaagatgtcaaatcggatgcgttgacacgtgctgctaatacagatttagcgggagccttacaaggaaaagtatcaggtattgacatcaccccatcatcaggtatgccgggtgcttcttcaaagatcacgattcgcggttctcgttctttcactggagacaatactccattgtatgtaattgatggtatgcctatcgcttctaccgcagatgtgagtacttctcttaccgatggagcgtatggaacggactatgctaaccgtgctgtcgacattgaccctaatgatatagaaagtatcaatatattaaagggacaagccgcttctgctttgtatggtatgagagcttccaatggtgttatcgttatcaccaccaaaagtggtaaaggagcagataaaggaaaaccgactattactttcagtactaacctttcctttgataagatttcaactcttccggaactgcaacaagaatatgcacaaggttcaggcggtactttcgatccgtcatctcctttcgcatggggtcctaagatttccgaattagctaacgaccctacctacggaggaaatacagacaacagttacaccagccaatatggtaaacagtccggaaaatactatgttcctcaacttgcagctgccggcatgaatccgtgggctactccacaagcatataacaacatgaaggacttttttgaaacaggtgtatcttggagcaataacgtcaatgtagcccagagattcgacaaaggtaactactccttttctttgggtaacaccaccagtaatggtatcgttccatcaaccggtatggatagatataacgtgaaaatgtccgccgaagcacaactccatcctaactggactaccggatttaatggaaactttgtgacttcaaaaatctccaaacagtctacagccaacaccagtgtggttgctacgatctataatgcacccgtcagctataatatggccggtattccttctcacatagaaggcgacccttacacacaaaatacatatcgagacagctggatcgacgatgcatattgggcagttgacaataaccagttctctgaacgttcacaacgtttcttcggaaatgctttcgtgaaatacaccactaaatttggaactgacaaccacaaactggatattaaataccagattggtgatgacgcttatactaccaattattctgaaatctacggatatggaagtacttgggcgcctacaggtgaagattcagaataccattacaccgttaatgagctaaattcactgttaactgctgcctatacatggaacattaacgaagaatggacgttggacgctttgattggtaatgagtttgttgataaaaagacaaaatatgaatatgcatatagcatgaacttcaatttcccgggctggaatcatctgaataatgcttctgtattctccaatgagagcctatacaacaagaaacgaactgttggtaatttcgcaaacttgtcagtagcatggaaaaacatgctttatctaagcggaagtatacgtaatgatatcgtttcaagtatgccacgtgacaatcgttctttcacttatccttcggtgtcattgggattcattttcacagaactggctcccctgaagaataacatattaaccttcggtaagatacgtgcttcttatgcggaagttggtatggctggtgattacactcaaagctattactatactccatcttatggtggtggtttttatatgggaaatccgattgtttatccaattaatggagcaatggcttatattccatattataaggtgtatgaccctaacttaaaaccacaaaatacaaaatcttacgagttgggagctgatcttactttcttaaacggactggttactttgaattacacctattcacgtcagaatgtaaaagatcagatattcgaagttcctttggcaggttcgactggtgcctcaagtatgattatgaatggaggtaaaatccacacaaatacccacgagttgacattgggcgtatctccggtagataccaaaaacttcaaactcgacttcgctttcaacttctccaaaatcgacaattacgtagacgaattggctccaggagtagaaagtattatgttaggaggatttgtaactccgcaggtacgtgccggaattggtgacaagttccctgtgatctatggaaaaagctatatgcgtaatgacgaaggcaagattgtagtagacaaaaacggacttcccatgcagggagaagatgcggttatcggaactgtatctcctgacttccgtttaggtttcaatacaaatatcgaattgtacaagttccgtatttctgcagtattcgactggaaacaaggaggacagatgtatagtggtaccgcaggtgaaatgaactattacggtgtgagcaaattatctggtgatatgcgtaataccgaattcattgtggaaaactccgttaaagaaacaggaaaagatgcagacggtaactcaatttatgcacccaatgatataaaggtaacagacgctcaagcatatttcacaagaagaagatccattgacgaatcctacatttatgataattcttatatcaaactgcgtgaattatcagtaagctatccggtattctcaaagaaatggctgaatgtgaatgtgaatgtttttgcccgcaacattttggtttggtctgaaatgaaaggcttcgatccggaagcttcacagggtaatgacaatatgggaggtgcattcgaacgtttctctcttccgggaacagccagctatggttttggatttaatgtaaaattctaattagctaaaaagaaagatgaaaacatataatataatcaaaggcatttttgccgctactgttttatcagttgtcttttccggatgttcggaagatgcaatggatagaatcaataaggatcacggacatacgcaaagcgtggccggaagattcattctgacagatgtaataacctctaccgcattctctaacgcaggaggtgatttcaatacttatctatctgcttacattgaatatgaagtaggtgttgacaaccagttgtattatgcagaaaccagagaaagcgaaccgacctcatcttccactttcaataatacatggaatggtctgtattccacattgaaatccgcccgtatcattatcaatcaatgcagtgagggaggaatagattatggaaattttgcaaccaaaggtatggcagaggtgttggctgcttataattgtgcattgatagccgatatgttcggagatgctccatgcagccaggcagccttagttgacgaaaatggttctcctgtttacctgactcctaaaatggataaacaagaagagatctatacacaagcaatgcaatacctggacgatgctattgcagacttgcagaaagaggatctgatagacccgggagctcaagatttgttatatcagggcgatgccgaaaaatggctaaagttggcgtatggtctgaaagcgcgttacacaatgcaccttcttaaaagatctgccaacaaagacgctgacatggagaaggttttggaatatgtggataactctttcgaaagtgcagaagagcaagcagcattcgacgtatatgacgccaacaatataaatccgctttacggtttctttgtggcacgtgccggattaggtgcaagcgaaagcatgagaagcaaactggcagaatacaacgacccacgcctgtccagagctttcatcactaaacaaggtgcatctggaaaagaacaagccccgggaactgctgacaatgccgtatatgcgcctaacggttctccggaacaaggcacttccaagtatgggacttctttatttatgtattctatatcagcacccacactgttattgagctatcatgaattaaagttcctggaagcagaagctctatgcagattgggacgtgatgcaaaaagtgcattaaaagacgctgtagtagccggattgttaaatgcagaaaatagctttagcgtttcaagaaaggaattgggcaaaacgctcatcaacccggcaagtagtattacagatactgaagccgaaagttactttgacaatacaatagaagccaaatatacagccgaaccgttgaaaacaacaatgattcaaaaatacttcgcattatggggagcctcaggagaagcgacagaatcttacaatgatgttcgcagaatgaaaggactaggcgaaaactttattgagctaaaaaatccaaactctttcccattacgttgtccttatggcaatagcgacacaacaacaaatgccgaagtgaaagcagcttacggaaatggacaatatgtgtatagtgaaaacgtttggtgggcaggtggaagcagataatccattgacttgaatcatataaatgagactgaattctctaggggaaaggcgggaattcagtctcatttctttatatcaagtttgagaggtgtaaacagaacattcagtcacaattatgccaagagaattataacaactatacatgtctactgattttcccggttcatacgatacatcataaactatacttttgttatatttgcagacgcttgaataatatagaatacgatgaatcatatagaaacccaacgattgatattgcgacatttcacagaagaagacataaacgccttgttctcaattctaagtgataaagacgttaatacatttctaccgatgttcccattaaaagatatagaggaagcaaaagactatctccaatatataaaaagctggattcagcagaaaggattctactatgctatttgtatgaaaacaaacaatgtacccattggttgtatccatataaacggagatgacagccatgatttggggtatagcattaagaaggagttttggcacaaagggatttgtacagaagcttgtcaggcagtaatcgatatgctgaaacaaataaatattccctatatcacagctacgcacgatgtaaacaatccgagaagtggaaaagttatgcaggctataggcatgaaataccaatattcttatgaagaatattggcaaccaaaactttatctggttacatttagaatgtatcaattaaatttcgatgaccaacaagacagggtatataaaaaatattggaataaataccctgttcatttcatagaggagatataagcagtattgctacttcattccttctctcacaatatctaccagaatcggcttcaatccgctaacgaaacattccactgcaatcaccatcagaatcagtcccataagacgcatcatcacattattacccgtttcacccaagacttttaccaatttcgtggaagcacgaagaataaagaaagtcagcagataaatcagggcgatagtaccgatcaatatccccttcatttcataagaatgcgcatcctgcatcaaaacgattgcattggcaatcgctccgggaccgcataacataggaataccgagaggagtaatagagatatcatccgcatacgttttgatttcttcgtccttcaacttcatcggtgtatagcgggcttgaagcatatcaaagcctatcttgaagataatcaccccaccggcaatacggaaaccattggtagagataccgaagaacttgaaaagaaactgcccggcaaagacaaataccatcaatgtaataaacgacacaatagtagcacgacgtacgatagactgacgttctttatccgtcataccatgagtcatggtaagaaagacaggcatcgttcccaacgggttggtcaacgtgaagaatgaagtgaaacaaagtaaggcgaaaggcagaagcgtactatccatgattatatcgtattttatgcaaaactaaaacgcaacaaaaatacgacttaatccagaaaacctataataaatccattaattctttcaaggaatggatgtgataagtagggaggaaagggaaagctgtccgttctgtcacattgtagaaaacctgatgcatccctactccgtgcgctccggttatatccgcttcccaactatcaccaatcattaaggattcgcgcaactcggattgagtagcagacaaagcaaaattgaatatctccggccaaggcttcagcactccgagatcttccgagagaatcacctttctgaaatacccgtccactcctgccgaacgcatcttacgtgattgcaattcacgaaacccattggaaaggatatagaggttatatttgggagcaagatactccaatacctcctttgcatgaggcattaaaacacttttagtagggataatagcgaaaaaatctctcgaaaaccgttcagcgagcgcttcatctttcactcccacggcctgtaaaggataaaagaaacgttggctgttcaattcatccttcgttatctttccttcaccgtactcaacccagagttcggtatttctttgttgataaagagtataataatgattgaatgaatcaaaatagcggtcgaacgaatatttctgatatacttcctcaaaggtgttacgagcattttgagaaaaagcccagatggtatcatcaagatcaaaaaaaagatttttatatttcatcagtagttatataataagaaacaaaaaagccaatgtgctaatttcttgaatccaggaatcagcacattggcaattcaaaagggatatctaccttattttacctggataaccaagtatctggatacactccagaattcagtaggattagtaatcttcaatgtcaactggcctttatcatcttttaccaattcataagaaccggtcggatgagtagtcagtaattcagcacgtttagagtacaacttgatttctttggttgtacggatatcgatctgcgtgaaataatccttattgaaatcagcgctcttcaacacgtctccgctctgaagaatcttttgagctttcaattcagatttagtaccaaatacgaaccaggcagcattcaggctcttttcctgttctgcaacggttttagctttcgcttcgttttctgcggccagagtttcttttgctacagacagatcgctgacagcagcatccaattcctgaatacggatatttttggaagccagttctgtttgaagctcttcgatacgctgttgtttagcgttcaattcagcagtcaaagcggcaacagcttttttcatctgtgcagaattgtaattgctattcttcagctgtgcctgcaattttgcaatctgcgctttgttttcttccatttgtttagagatgaattcgatgtcagaagcaatctgttgcttagcactggcagagttttcagtgatggttccacgttgcaagtcaacacggctttcagcagcattgatcttacggaaaccttcctgaacttcattgaaagtccccatcatatcatccagttcagcattgcgctggttcagttccatcaaaagagaatcattttcagctttcaggtctttacttccacctttaaagccatcacacgaagccaacaaggctacgcatacaaataaaacagctaactttttcatacgtttacgttttacgttttttaatgaagttatttaatcatctattcctgctaatactatcacaatctcgccccggggttcggtagcggtaaagtgttctatcaattcagccaaactgccccgaactgtttcttcgtggagtttggatatttcacgcgacacggttgcctgacgttcagcaccgaaatattcggcaaactgtgttaacgtcttcaacagacggtggggtgattcataaaacaccatcgtgcggtgttcttccgccaatgtcttcagtcgtgtctgccgtcctttcttctgggggagaaatccctcgaagcagaacttctcgttcggcaatcccgatgctacgagtgccggaacaaaagcggttgctcccggcaagcactgcacttcaataccgttgcgcacacattcacgaacaaccagaaatccgggatcggaaattccaggcgttccggcatccgaaattagtgccaccgtttcacctgcctttattctattaacaacactttccaccgttttatgttcattaaatttgtggtgggattgcattgcattctttatttcaaagtgtttcagcaagataccggaagtacgtgtatcctccgccaaaatcagatcgacctctttcaggactttgatagcccgaaaagtcatgtcctccagattccctaccggcgtaggcaccacatatagctttcccatcttgtttttgttttatactgattgattaaaatatttctttagtagctccagaaagtcgttcaccgcctccttttcttcattcaattcgactttcgaggacagaaatgcgactgcagtcttgtaggaactcattactgatatctgttcgataacccgattcatcaaatcagtgttgcctccgaacagttcacgagaaaaacggaaagaatcattcaagctgatagcatgtcgcaagccggcagacagtttgagactttctcccaacacagccgatttaggttcttcctctttcacaacagtttcaacgacaggttcctcaacaattgccggttcctcttttttcccttcttcttcttcttcttcttcttcttcttcttcttcttcttctgctgctgctgctgcttcttctgctgctgctgcttcttctgctgctgtctctgcagctgccgctattacgacaggtttctcttccgcaacaatggcttctccttcctcatcttctttcacaacaaccgattcgagagattgtataatcacgggggaatcctcttcagacccggcaacttcatcctcctcttccgctgtctcttccacagctgacggagaaattacctgaacagcatccacctcctgctgcagttcgtccaaacgcccctgcatccgtgtaatgctccgcttcaacagttcagacaaagtcggagtcggctccttggtaaatgaatccatgagatacttcaactcatgaacatccaactcaatatctgttaatagcttctgtttcatgtcagtccattgtttatacggtgcgaatgtaggaataatttatgcaataacttaaaataatggataatttaacagttcttgcacattgaattgcttacctttgtccacatatttatttaatcaagaaaacacaaaatctcatggtattattttcagaagaccacatacaggagactagaagaagaggccggatcgaagtaatctgcggttctatgttctccggaaagacagaggaattgattcgcagaatgaagagagcgaaattcgcgaaacaacgtgtcgagatattcaaacctgctatcgacacccgttattcagaagaagacgtagtctctcacgacagccattctatcgcctccactcccatcgattcgtcagccagcattttactgtttacttctgagatagatgtagtaggtattgatgaagcacagttcttcgacagtggtttgattgatgtatgcaaccagcttgccaacaatggaatccgtgttatcattgcaggattagatatggacttcaaaggaaatccgttcggacctatgccacaattgtgcgccattgccgatgaagtctccaaagttcatgcgatctgtgtgaaatgtggtcagctggcttctttctcacatcgtacagtcaagaatgagaaacaggttcttttaggcgaaacagccgaatatgagcctctgtgcagggaatgttatctccgtgcacgagaggaagatgagcagaaagtataaactctataaagaaacagattatggaaaggaaaaagataacattcgacagttttatacgcggttccatcggatgtgtgttagttgtaggaatattaatgctcgtggaacgtcttagcggagtgttattgcctttctttattgcgtggctgatagcttatatggtctatccgttagtcaaattcttccagtataagctacgattaaaaagccgcattatttccatcttctgttccttattcctcattacggttatcggagtcactttattctacctattagtgccaccgatgatttcggaaataggcagaatgaacgatttgttggtgacttacctcaccaatggagccggtaacaatgtacctaagaacctttctgaatttatccacgagaacattgatcttcaggcgttgaaccgtgtattaagtgaagagaatatcctggcggcaatcaaggataccgtccccagagtgtggactttgcttgcagaatctctcaacattctattcagcatccttgcctccttcattatattattatatgtaatctttatattattggattacgaagcaatagctgaaggatggttacatctgctacccaataaataccgtacgtttgcctccaacctggttcacgacgtacaggatggtatgaacagatatttccgtggacaggctttggttgctttttgcgtaggtatccttttcagcattggtttcctaattatcgattttcccatggctatcgctttgggacttttcatcggagcattgaatatggttccctacttgcaaatcatcggtttccttcccaccattttattggcaattctcaaagctgccgacaccggacagaacttctggattatcattgcatgtgcattagccgtctttgcgatcgtacaaatcatacaggataccttccttgtccccaaaatcatgggaaagattaccggactgaatcctgccatcatccttttatctctttctatctggggttcattaatgggaatgctcggcatgattatcgccttgccactaacaactttgatgctctcctactaccaacgctttattatcaacaaagaaaagataaaatatgatgaagtagaaactactgataatcaagaaacaagccacaacgaggaaaaataattgaaacttttttctacggaatgcttgcaaattaaataaaagtaactacctttgcacccgcaatcaggaaataactgattcgcaaataaggattgattcgctagctcagcaggtagagcacaacacttttaatgttggggtcctgggttcgagccccaggcggatcactgaaaacaaaagaaaaatcaagcaaatccctgataatcagacattatcagggatttattttttctggcaggtagcagaaaaaagccgtttcaagcatattattccgaacacagaaaattaattttgtaaattaaaaacgttacggtataaaaagtacatttagaatcctcttctatttaaaaaagaacgaaccgaagaaagacggacagtgactattatagtacgtataacagtcgatggagaaaccaagcaattcagcatgaagaaaacaattctccctgaaagattgggatataaaatcaggtcgtacagttaataagagcggaaaaaacactagtgccaaaaatatccaagtcgaataaagaactggatgatttacgtggtcaaatcttcatacaatacaccaagcagctaaacaacaatggatatgtagagccgaagaagttacgcaataacgtattggctatagaggaaaagcaatacagcctactcacttactttacggaacataattgcaaatataaaaataggaacaacacagtagtagtgacttgtttttaacagtggttacctaaaaaatataaaagtcactacatatattatttcctaaaaaacaacagtaaaaaattatataattactatatttgtaaacagtaaattaaaaggaggacataaaccatgtatatatcaaaagtttcattagtaaactaccgtaattttgaaaattctttttttctctttaacaaaggaataaatacaattataggagaaaacgcatctggtaaaaccaatctatttcgagctattcgcttaattttagatgacactttgttgtcatcagcatttaaactaaatgaaaatgattttaatcgtaatttgaagaattggaaaggaaagtggattattattagtttggagtttagtgaaatatctaacgatgaagctgttcaatctttatttatttatggaagtggagttgtagaaggaaaagctaccccaaaagcaacatataatttattttttagacccaaaccagaaattagaaaacaactttcagagttgaaagctggcgataaagatggactaaacaagatatttgataaaattacaactgaagattatgaaacatttttacagggaaaagtacagctgattttaataataagaatgttcagcgtgaattaatgggcgattttgataatgttatttttaaattcgatatagacgaattaaaatatggaggccgtataccacaccaattgtctataagtcgagaagtttcattcactttcataaaagcgttaagagatgttgtgtcagatttccaagacaataggaaaaatccattattaacacttcttaaaaataaaagtgaagacataaaagaagaagattttaaaccaatatcaacaaaagttgatgatctgaataaatccatagaagaattggatgatatacagatgattacaaataacatatctgaaactattaaggaggctgtaggcactacgtattctccatcttcattatctattaaatctaacttaccaagtgaagcagaaaaattacttcagtcattaaagctatttataggagaaccaggagaagactatgaaggcggtattcatgaattaagtttgggaggagcaaatcttatatttttaacattgaaactacttgaatacaaatatagaaaagaaaaagataaaatagcaaattttcttttacctcaaatccgcaactacgcgcctaatatgatacagaagcgaaaagaatctgcatcgttagtaaaaagggggcacagtgcatcgaatgtcaccataaagacatataaatgccccttaccccaccatgcgacttgaggcaatacgcaaaatcacgactataagttgtcggtgttatccaaagtcattctggaacacattggcataagcattgttgcatgaatagatattcagcacatacttccttgatgtcctgacccatttggctggcacagagatgaacttaaagacaaacgtcttgatgcggcttgttgctttgagtccgaacctcttcacgtcaagcctcgccatgatgaatttatagaagttgcgtatgagtgccataagcagaagaaacaccgtgttttctcccataaaggattttggaagcctgttccagccgaatccgttattcatatcatcgaagatgcgttccttccctccacggaggttatagaattcgacaatctctttctcggaagactcgtagtcatttgtaaggatgcagcggtaggtgtattctccttcccacaggtcgagttcgccgtctatccgcttctgtctttgaatcacaagacggtatgccttccctttccatttctcgatgagaatggaggccagctcaaactcaatgccgcccaattccactttcttccaacctctgagggcaaagatgtcattgtagagcgaactgcatcggttagcacggatatagaaggtcttgcagtgtttagcaatctcttccactatctcttcagaacacgagccgcaatcagctctgaaacggttgataataagcttgttttgttcaaacctttcaaagaacctcttcagcgtgtccttctggtggaaacggacatttgtgttgccgtcgctgttctcaatgccgacaatcaagttgccaataaccgccacgccagggcgataaccaaggaacttcttgtatgtaggcttcgcatcaaacttctcagcctctatgaactggtggtcgaagtcaacgtcatacccctcgccctctttcagctgccctgtggacaataggcaattgaggagcagtgtattcagcttgtctgccgtgttgaagtcgtaggtcttgccagtgtcggatgtgtaggaaatgttatcctgggtcagttcctttatggctctaagaatcgtgtcggcactgcatgtgcgaagtgtcggatgaagcgaaaggtggtacatcagatgagtggtgacatcctcgatgcatgagccgccacaaaaataaacgctcataagcgaacggatgatttcgctgtattgataaccatacagcctgcatctcataccgagggttgagtcgattacagatgagagtctggagtcaaattgctccattattgaaaatattcctccaaaaggagtgagtttctcggatttaattgctacctttgccatgtctgtcgggtttgatacatattttgatttgcaacactaagataggtgaaaaatctgacatggcaaattcctgagcaactttttgttgctcaggtacttaaaaagttatatttgtaatagtgttgcggaattaaggttttaatagaagaaccagaggcccatattcatacacatatacagaaagcattatttgataaactaaattatactgatacacaaattatttattcgacacattctactcatatttctgaagtatcaaatatttccaacatgaatattttaggaaaatttcgtaattactctgaagtatatcagccatttatcgggctaaaagaagaagaaatagtgaaaacacaaaggtttctagatgctataagaagcaatttattgtttgccaaaagcgttatattagtagaaggagatgctgaagaaatacttattcctattatggtaaagcaaactttaggtgttagcttagacgaattaggaattagtattataaacataagaagcactggctttgaaaacttagcacagctttttcataatcaaagaatcaagaaaaagtgcgcaattataacagatttagacacatcaattacaggacaaaaaacagaagcttctaaaaggggaaaaacaagaaaagaaaaattggatgcattgaaaaaaagaaataaatggattggggtattttatgcaccatatacatttgaaattgattttttaaaagctaataataaagatgaagttttatccacaataaaagatgtatatgtggataagacagcaattcaaaaatcggaaaaagatataaattcaaaggatattaagaagtatggaaaaagaattctaactatggcaaattatatagggaagggttggtatgctatactccttagtaattatattactccaacgacttgtataccaaattatatattggatgctattttatttgtcaaaccagaatattcagaagaattgttattgcaaatatttagctatgtggtaagtagatatgaacagtctgataaaataaagagtttaaataaaaatatattaaaatgcaaaaagggagagttgccattaactgatttaataaaagagttgtatgaaaaattagagaaggaagaacctattttatatatattaaatcgactttaaaatgtttgtgtggaaaaatggagaactaaatccagagcaagaaagtgccatatttaatgaaaatagtgttttattaatagcatgtcctggtagtggtaaaacgagaactctaacttataaaattgcttatgaattgtctaatttgaaatcaaacaagcaatatattatagctattacatataccaatcgtgctgcagatgaaataaaagaacgaatagaattattaggaatagatactaagcaattatggattggtactattcattcattttgtgctgaatggatactcaaaccttatcacatgtacattgaagaacttaaatatggatatactattattaatgcacacgacacagaatcctacctaacttcgttatgtattccatatgcatcagcaaaacctaaaattacatattgggactgccagtgtttttatttcacgtcacgtggattagttataaaatgtacaaattctcaaaaaacagagtcagtcatatctataattaaaagctattatcaaaatctaaaagaaaaaaaagaaattgattttgaactgattttatattattcataccttcttttaagagataataaaagcatttgtaagacattgtcacatatcttcccttttatattagttgatgaatatcaagatacgaaggaattacaatatatgattttaggtgcaattttagaaacagggaatagcagtaaggctttcattgtaggagaccctaatcaatctatatttagtaatttaggtggatttcctatgaccaaagttgatttagaaaaaaatacaggattacattttgatgaattatcgctaactaagaattatagatcatcatctcgtattatatcgtattttaactactttaaaacttataataatacgatagaagcggttggaaaagataaggattatcaaagcattattcgttacaacaaacgggtttctattaatgatttagaagatgaaataattcgtataattcaatttaatattgatgaatgtggtatttcgccaaatgaaatttgtattcttgcaccatggtggattcacttatctgggctaacaagaaatctaatggctcgtctacctcaatacagttttgatggtcctggtatggcaccttttgcaagagatatagataacttctggtataaattatcacgtattatattaacagatgcaacaccatctttatatataagacgactccgttgggctaatgaaataaaaacagatttttcatcaataggaattgatagaaatctatctgctaaaaaaatattatgtatctgtaatagtatattagttaatgaacaagatggtttagagtatttaaagaagtttttctttctgtttctccatgaactaaatatagatatacatcaatataattatttagaaatgcattataatgctttttttgaaagctctataaaaagaatagaaaggctaagaaaagaagggtctgaatttatttcgcacattgatacttttagaaaggtttttcgtcaaaaagaagggataactatttcaactaatcatggagtaaaaggagctgaatttgacacagtgatagctttcggacttttagaagattatgtcccacattttagtgatcctaataaagtagaaaatgcaaaacgaattctatatgttatagcttcgagggctagaaaaaatttatatttaatatccgaacaagatagagggaaaattccaacaatcatactaaataattataaatacaaatattagtaatacgcgaatcagtatattccgggactttccataatattgtgtaaatagaaaactacgggattcttctcgtagttttttttatttatatattaactttgtaaaaaagcagattttatggacatccccaaagaatttttaagtaaagagttcctgtctcagtttaagacaggtgaagatgttaccgctttcatgaaagagcttcatactcgtgtctatgagcaaatgttggaagctgaacttgataaccacttaggttatgagaaacactccaatcaaggcgatcatagtggcaactcccgcaatggtagttataagaagcagattcaaacagagatgggagaatctgttattcaggttccccatgatagaaaaagtgaatttgagccaattgtagtccctaagcatcaatcccgtggcttgtctattgaacgtcttgtaatctctctttatgccaaaggcatgagcgtatctgacattgagtcagaaatgcaagaaatatacggtatcaatctttccacctccgctatctctattattaccaataaagtcagccaggctgcttcagagtggcagaatcgtcctttggagagcttatatatgattgtctggatggatggtatcgtatttaaagtcagggaaaatggtaaggtcatcaacaagaccgtttatttatgtgtaggtctaaataaggaaggcttgaaagaggtattgggtatgtgggttggtaaaaatgagagcgctgccttctggatgggcgttttaacggatctcaaagctcgtggtgtagaagatatactgattacggttactgataatctgaatggatttacagaaactatcaagagtgtgtttccaacatctaccactcaaatatgcgtagtgcatcaaataagaaactcctgtcggtatgtggtctggaaagaaaaaaaggagtttacttctgatttaaagaatatctataatgcacctactaaagaagccgcaaagatggagttggagaactttgagcaaaaatgggggactaaatatccatatgcgatacgctcatggagaaataattgggaagaactcaccgtattctttgacttcccggttgaaattagaaagatcatatatacaacgaatctcattgagaatctgaacggaaaaattagaaagtacaccaaaaacaagctatcattcccaaatgatgatgccttgaaaaagtctgtgtatctggctattacagaaatagaaaagaaatggtatcaacctatttggaattgggcattgatttttaatcaatttataactatatttgaaaacaggattcaagcataaaactcgaatcctctagttttctatttacacaaaatcgtggacagtgcctatattcccctgattcgcattatttataaagtttcacttatttttgagtaattctattttttctctctcgctttgcaacaagcgttcatacaattcgattattttatcaactggattaatttgttgagaggcaacataaactgccgctattgctcccggagaaatagtagcatctttatagctattgatattgtatatagctctttcaacatcaaagtccttaattacttcagcagaaatacctaacacagaagcaatcttattcaaaagtccttcctctatctccgattccttctctatctttgaaatgacattttgacttactccaagatcagccgccaaagcttcttgcttcatacccaaatatacacgaatcttttgtatattgcgtccgatatgtctccggttcactatgtcttttacatcattatccatatcattatttctttaagtgattacattgcgacaaagataatgaaaatcaattcagaacaaattatagctatctctatttttcacaactataaattgcaacttgatatttattacagaaaaagtagtaaccttggttatttatcatttttactgttctctttattgtatttctctctttctatttttaacaattcctcaaatagtttgacggcttgctccattgaaaagtgattaatattctcaagattcgagattgtgccaatattggtagcagttgcatttgaattctcataaaagttatttgtgtagtacagcacagtttcttcagtaaacttttttaagccttcttctgtaacacccaaagcatccgcaacccgtttaattctttcatcctcaatcttttcagactgttccattttggacacggcttgttttgtaattcccaataaatctcctagatcagtttgagtcatcccacgaagacggcgaatcctctctatttttcgacctatgtgtgtagcattcgtattaatttcattttccataatgatgaatttatttctaagtctgataaacagaacaattaataatcacttatttttaagcaactctattttttctctttcactttgcaacaaacgttcatacaattcgattattttatcaactggattaaactgctgcgcaattgatgtagagccttgttcaaaagtattatctctaatattattgatgttataaatagccttttccacatcgaaatctttaatcacctctgccgaaattcccagtgcagaagcaagctgattcaaaagtccctcttctatctccggctccttctcaatcttcgaaatgatattttggctaacgccaagatcagccgccaaagcttcctgcttcatgcccaaatatacacgaatcctttgtatattgcgtccgatatgtctccgattcgttatgttttttacttcattatccatatcattacttattagtgaatacgtcgagacaaagataatgaaaatcaactcagaacaaataaaagtcaactctatttttttcaatccccagttctatatgcataattttgccctgtcagtttttttacagacatgaatcgtggcgccacatttaaaacagtgcagaaggatgcgcaattgacattgacattctgaacaatcatcatttaaccaataaaatctaatagcctatggggtaagtaaagtcgttacaatcgaaacatagctttaaatcatctggaaatttagctatccaaaaacaaattagtaaacatacaattaaacaaaaagcatgaaatcattttctgataaaacaaacataggggagaataatcccctaaagactgcttatagaatgaatttttacctattattcctattaataggttccttatcgatacttggatcaacacgggcttattgccaacagagcagaacgatctcaggtatagtgaaaaactctcaaggagagactattatcggagcgaatatcgttgaaaaaggtaccagtaacgggacgattacaaatgtagacggactgttcacactgcgcgtagcacccaatgcaatattaaaggtatcttatatgggatacacggagcaggaagtcaatacacgcaacaagaacaagctggaaatcatactgacggaagatgccagattgattgatgaagtagtggtggtaggatacggatcggtcaaaaaacgggatttgacgggggcggtaacctccgtcaaaagtgcggaagtactggccgctcctaccaataatgtgatggaagcccttcaaggcaagatacccggaatggatatcaccaaaacttcgggacaggtaggaggtgatgtcactatcctgttacgtggttcacgatctatctatggcagcaacgaaccgttgtttattatcgatggaatccccggcagctatagccaggtcagcccgtcggacatcgagagtgtagatgtattgaaagatgcttcttccaccgccatttatggttctgcaggagcaaacggtgttgtcatcatcaccacaaaaagaggaaaagagggaaaagcgaccgtaaacttcgatgcttattacggattcagcggttcacctaactacaggcatggaatgacgcgggatgaatgggtcacctaccagcaagaagcctataaatataaaaacggtgactatcctaccgatatgtccgccctactggggaaacaggattttatagatgcatacaacgacggcaaatggatagactggatagatgaagtgtcgggcaacacggctaccacacagaaatacagtctttcggtcagcagtggcactgaaaagacaaaattatttgcttcgacttcctacaaccgggaagaaggtttacttaataacgaaaatctgaacagatattcgttacgcctcaacctagatcaacagatattttcatgggcaaaggtgggctttacctccaatttagtctaccgggacttgaactccggcgtaaaaaacacattcacaaaatctctctctgccatcccgttgggtgatgcttataccgaaaaaggggagatcaatcacgaatacatcacaggacaatattccccgatgagtgattttatagagaaccagtatgtagacaacacacgttctacctacctgaatatgagcggctatgtcgaactaactcctgtcaaagacctgacttttaccagtcgtgtcaatggtacgttgaatcactcacgccgcgggcaatactggggagagaagtgcaatgccaaccgtccgtcttatgcaggttcaccgcatgcttccatcaccaacaacaatgcctggaattacacttgggaaaatattctcgcatataacacaaccatcgccaaagaccataatctgggaggttcattgattacttcctggaataagaaccagtcggaaagtagcatggctgccgccagcggtcaaatggtagatcaatggtctttctggcgactgacatcgggcacttcccaacatgtagaatccgacttcgcacagacgcagaaaatgtcttttgccttccgtctgaactattcatacaaaggcaaatacctgtttaatttctctacgcggtgggacggtgtttcacaattctccaccggacataaatgggatgctttccccgcaggcgcactggcgtggagaatatcggacgaagcatttatggaaaagacacgtagttggctggacaacctgaaattgagagtgagctacggtatcacaggtaactcgggaggaaccaccgcatacagcaccacaacacaagcatacgtatataccgcttcgggaatttccattaatgggaagattgttcctttcacgcaatactccggtacttacggtagttccgatctcggctgggagaagtcatacaactggaatgtggggttggatttcggtatcctgaacggtcgcattgacggatcggtagaatggttcaagacaaccaccaaaggattattattcaaacgtacattgcccatcaccagcggtctgaccggatggggatcgcctctggctatctggcagaacatcgcccagaccagtaaccaaggtgtggaagcaacgatcacttcgcacaacatacggcataaagatttcacctggaacaccactttatccgtcacttggaacaaggaacaaatagacgatctgcctgacggtgatctgatcgccgaaaacctgtttgtcggtgaaccgattaaagctatttacggatataaatataccggaatttggggaaccgatactccacaggaaacattggatgcctacggcgtaaaacccggattcatcaagatagaaaccttagaccagaaaggcgatggaggtgtgcataaatacagtacggaagaccggcaaattctaggacattccaatccggactggatcatcggattcagcaattccttcacctacaagaattttgatttatccgtctttgccatggcacgttacggacagacaatcaacagtgacctgctcggttattataccgccgaacagagcgtaaccaagaatcaactggcaggcgtagactactggacagaggataatcaaggagcctatttcccccgtcccggaacgggagacgaacaaaaaaccgtatatccttcattaagagtgcgcgacggctccttcattaagattaaaaatatcacgctgggatatacactacccgtcaatatttcccgcaaagttttaatggagaaatgccgtatttatgccacagcctacaatccgttcatctttgtaaaagataagcagttgaaagatactgatcccgaaaccaacggttcggatgcatttcctacctaccggcaatttgtttttggcgttaatttgacattctaacaaaagattataatcatgaaaagtatatatataaaattcatattttgcagtgtgctattctcggccttatctctacattcctgcaccttggaggaatacaacccgggcgcatttaccaaagaggctttggctacttccatcgatggatatgaaaccctgattaaccagtgttattttgctatggaaaggttttactacggttctgcggactggatgtcactgactgaaggcgacaccgatctttggacgtataaagccaacgaatcaacaagttacacacagtggttctggtttttcgcaggaacatcacccaatacgacttacaccaataattggtggaacgggacgtacgacggtgtgggagcctgtaacgaagctatcgcattaggagacaaacctccttacaccacggaagaggagcggaatgccaagattgcggaagcccgttttcttagagctgtctattatttcaatgcagtggaacaattcggagcagtgacaatgctcacagaaccgataacagcggaaacactgacttactcacccacccgtaccgatccgatgactatctaccaggaagtaatcctgcccgatttaagattcgcatccgaatggttgccaacaggtacgcatgcaactactaccaccccgacaaagaaagccgctctcggttttctggctaaagcctgcttgcagacgtacgaatatggaagcaccgaatatttgcaggaagctctggatgcagcccaaaaattgattaccgattgcgaaactggcggtggaaaatacaatacgtatatgtatccatcgtatagcgaagtgtttaaagagagcaataactgggaaaacaaggaagctctctggaaacatcgctggtatgcaggagcagacggtcacggatcaagcaacggaaattacaagctaaatcgcaacgatgagtatttcttatgcaatatcaataagttcggtgctcgtgaagataatcaggaaacacgtcttacttgggaaggctcaattaccggtatctttatgcccacacagcatttattgagtttatatgtacagaaagacggaacattggaccccagatttcatgaatcgttcactacagagtggaacgcgaacaagaattacacgtgggatgaaagtgccgtccacatgtatgacaaggaagaaaccgtcattggcaaagctctgaataaaggtgatttagccattaaattcatcatgccgcaggacatcgattatgcgacagagaaacaaaaagaacacatttctgattatttgctaattgattatcatcatgtatatagtgatgacaataataatgtgaacatgaattatgcttatacaaacgtcactggcaattacaaaaatgacggcacaaatgagaaccaattccgctactattatccatcactgaataagcataacagcagcaattattatgtagccaatgcttccaaacagagaaacggtaatctgaatgcaacgtttatcatgcgcatggcagaagtttatttgattgcggcagaagctgatatttacctgaatggtggtgcgaatgcagccggttatatcaacaaggttcgtgaacgtgccggagcaaatccgcttacagggagtattacagtacgagatatcttagacgaaagaggccgtgaactttgcggagaatattgccgcttctacgacttgaaacggacaggaatgtttaagaactcggagtatctggagaatactcatccggacttagcacaattctttcacccgaattatgcattacgtcccatttcaactacatttactgcaacaatcaccaatggcagcgagtatcaaaatccgggatattaagtaggaatttcaatatgtacaggtattatggaatcaatcttggcacctgtacattaattatatattaagaaatgctccctatctcgttttgagatggggaacatacttttcaaatatgagaaaaacaagatatagattaattatatcgaaaactgtttgctagtcagaataaagtctctacctttacaaaggataaccatgtcacttattagtggctatttaaaaccgcttatgcctgttgaaaatgaaaacagctatcatatattattcaaaacatggaactaccgagcgagtaacacaccttatcggagaaaagttgactaataaagttgactacatctcattaaaagagtgtccgagacctgatattcgaacttacgatcgaataattctcggaacagccatttatgcgggctctccaaaccgaaaaattactcaattctgtcacaataatcaactgttattagagcaaaaagtaatagggttattcatctgttgtatgaacgaagagcaagaagcggaagaaatgaataaggctttcccggagttcttgcagagattatcgattcccaaagccattttaggtggcgagtttcagtttgacaaaatgaatttcatcgaaagatttttgacgaagaaaatagcgaaagtaaattcttccgtttcgaagctgagatatgatgctataaatgagtttacaagtcagataaaagataatcatttatggtaacttcttgagttatctattgagcaactttgtattcaaataataaatagaatggccgtataagaaaacttctttcaaaagaagttttcttatctatttaagacaatacctataatcgcaatcttttacttttacgaatccattacttaacaatgttcttatggataaaacattagcctcatcagggtcagccaatatctctttccctcctatttcggcaatttccccgatcagcttctttacaataatcttcccgatgcccttacccaaatattcctcttcgcctatgagataacctatttcaaagactgtctctttctcatcgacagtttttccgtaatgttccggtatatattctttttcaaaataacaatccaagtataaacaaaagccaatggctttatcattataataaacaatgaaatgtttcatataatgatattgggtatttctattatttacctcatccaaccaagccattttatgttcttctccgtcagggcagaaccatttataaatatattctttagccaaccatttactgaaaatgtctacatccttatcacgcaaaggctttattgtgatcttatcattcttaatatccatacttttttgtggtgagacgccagcctcttttataaactccataaatccaactatctgaaatacaaagatataattttcaatacaataaagaagaactaaaggatatttataaagcaactcatgtccacagatatcacaacaagaaaacgaatgaccaagtataaagaatctaaaacaaacacaaatgtcgaaatcatacgttgggaatcgtacatgattacttatatttgcgttatcgagcaacttattaagaaccggatgatatgttaaaacggattaaatttcaaattctgtagaagtgtacatcccaataaaatactaaaaaggcaagaacatgaaactttggaaatatagtggaacacttttaacagcaacaggagtcattcataccatttatgcgttatttcttggaaaagaagcttttacggaaatgcttaacaatggattaatagactctattggagaaaatcataacctgggctttgctttctggttcctaatctgcggaataatacttattctttggggagagacacttcaatactatatcagaaaagaacaaaaaccggcacctttatttttaggttacttcattctactgttcaccataatcggttgcatagtcgaaccaatatccggtttctggcttttcttaccgcaagcacttattattatttattcaaacatgaaaaagcagtgagaagcatcatccatagcgaactcaaaaccgagtgcagtgcttaaatgcaacttattaaaatcccatagcatctttcactaaaaccatttctttatgagaggtcaacttctctaataaaagcaatgcaaccccgtatgatgtttgaggacaataagaagttatgatattatcatccaccacgatgggagaatttacgatagttgctccaaatccctgaagcactttctgtttatgagcacctctaagatgataagttgttgctttccgaccgttcaacactccacttttcccaacaggcaaagctcccacgcagactgttgcgatccatttcttttgtgagtcaaacagtcgtatcaattccagaagttgttcattatatgcctcctcatagaatccgaattcttcaaatccgccgggtatcgcaagcgcgtcatattcatctgcagacacttcatccatgactttatccaccaaaacaggaacattgaaagaactaatcactttttgattcaagccacaggtcacaacatctattttacaatcaaaatccgtctttgcccatcccataacatctataaaagcactaaactcaatcgtttcaaaccctttagcaaggaataccaataatttcataatcaaattagttatatattaataatataagaaacagcattgcactaaaaagaatgtgaactaaaatcaccttcattctttcctataatcccctctttacctcaccttttgcagcctcccaaccaatcattgcagtcttgcgaatctctccccaatggtaatttcccaactcaccggaagcacgaatgacccgatgacacggaataaggaaagctacgggattctcaccgacagccgttccaacagcccggcaagctctcggattattgattcctacggctatatctccgtaagtagtcaagccaccgacaggaattttcagtaaggtttcccatacctttagctgaaagtcagtacctttcagatgcaattttatttctttgagtttactccagtcctgcgtgaagataaataaagcattttgctgcacttcatccacaatcgaggtaaactttgcattaggaaacttcttccgtaaagagttaaaagccgcgtcatgttcgtctgcaaactccatacaacaaatacctttatcggtagacgcaatgaagatttcaccgaaaggacttttggcaaaactgtaattgatagaaagactttcacctccgtttttatattcgcccggcgtcatcccttctatatttacaaacaagtcatacaatctgcccgtaccggaaagccctgtttcctgtgccgcatcgaataaagacgcatgagtttcattcaagattctcttggcatattcaatactagtatattgcaagaacttcttagggctaattcccgcccactccgtaaacatacgttggaaatgcgccgtactcaacgccacctccccggcaatctcatccaatcccggttgccttttaaaattctcccttatatacccgattgcctgtgcaatgcgtgcatagtcaagcgttttttgctcattcataacagaggtttgccatttaattccaaatccagcaaccgctttttagcaggaagcccgccaccatatcccacaagagagtggttgctgccgatgacacgatggcacggagcaaaaatagaaatagcgttcgccccgttagcggcagcaacagcacggacagctttcggcaaatcgagttgttttgccagctcaccgtatgacacagtcgaaccgtatggaatctccaacaacttataccatacactcttctgaaactccgtaccaacaaaaagcaaaggcacctcaaacacagtccgctcgccattgaaatattcatccaactggctcatcgcctccagtatcacatctgatgtacttttctcataaccagctttcagcactttccgcaatctcctgtctacgatatccctatgactttcagccgcccagtcacaaagacaaagcttatcctcaaacgagccaagcatcaaatcaccacaaggagaatgataacgctgtatcttaattacattcgttttatcttccatacttccaaagatacgtttattatatttacagttgaaataacagctaataatattttcgtttttacactcgcactctcatttccaatgccgcaaaattactacacgcatcactgataaacgacccgaaaattgctgtttttacgtagaaaagacaatccccctcccactcctccatacaatcaatcgttctcaatatactttatcacccggcaaggactgccgaccgccacacaattctttaccatccgattcaatatccaattattttttatacatgatttactctcacaccctcacactttccctgcatccccctattcatcatcctttcagtgatgagggtaagagtgagggtaggtgagggtaactttttgccctcaccctgtctcgtcctgattgggttgacaaagccccctttcacaccacctttatcaattacttcactttcatcaaatgataaagcgtccctttacgagacttacgacaaggaatattcagtttttgaagtgcacgcccaaactgtcctaccttattaatagccagtttatcccgtgttttcgtctgtaaataactcaaaatctgcatggcagtcagccattcgccttccatttcctcttctacgggattaagatagcagtggaacagctgttccagcggactcgcctgttcaaactcacggttagtctgttttaatatgttttcatcctcatcattcagccaataacgttcacctttataaatagcctccatcgcttgagcataaagctgcttgtaattaatcgtaacattcgtattaataggagccgtcacctcaatgcaaataaaacggcggctaccgctaggatcggtaagcaaatctttctgattgctggtaccgataaaagaagcataacgcctcatttcccgaatcgtattaccgtatggtttgcgcagattcgccacaggcttctgcaacaaatgcttcaagaacccctgctgactgacattaatctgatcgaactcatcaatatttatcagaaaaaaacgtcccaaatagcgttccgcctcctgtttacttttaaaatcaatactgtccgtatagccgaaacgcaactccggcggcagaataatgcgacagaatgtagacttacgatacccctgcgaaccaaccagcaaaggcgaagtattattaccatgctgccgatcgactcccctccaatgcgccaccatactaagaaaccagcggtaaaataattcctgccaatgcggattatcacaaggcaccagaccagccaatgcacggatacgatccttcccgtcccagcgacctgtctcataaagatattcctccacaggattatacaaaggaacacattccgaattcagaaaacgatccacatcacggtcccacgcactgatgccttccttcaaagcattgattgcaatactgttgcgcacccgtttatccaccggcttaaagcaaaagtgaacagaatcgcgctgccgatattccaaatcgtcctgcaccgtattgtaacggaattcataccgacgtttcataaactcttccaacagaaaagccgtctcctgctctttactgatactgcttttcttgccgaatcccttacattcctgataaagattatgcaatatcgaacggatcacctgctcttcttcttcgcgataataatgaatcatcgtctgccgtatcgcttcctcttcgggaagccccgctttgaaacaatgctcggcaaggcgaaccaataaaggctgcaagtcgtccccacgtttccaatcctccatttcctgaagtgccctgttcaaggccgcttcataaatcttcgtgaatgtttgcgccgactcatatcccggctgcaaccgtaataacggatttttctctcccagtttccgctgacggaaagtctcttctcccggcatcataagcggttgttccaagcagaacggcaccgcatccggattataataaggagattcgtccagcgtcatacggcatctctgtgccaaaaccggttctttcaagtcaatatcgaaaggcaacatcggctgataacatttcacagccagccaataagcatgaacatgaaataattccgcctccgcttccttggtcggcaatcctccgtcatccggcaaagcgaagcgcacccatatcttcacactacgcccgctcgaaccaccaaaagtagcaaaagtctgtggcaaaagcgccgcttgtcgcttcacaaattccacttccgagccgctcgccagcctactcacttccaactgtaccaatccgttatactgcttcatcttccgttcgccctctttggtacgggtatattccacagcagaatagatgtatggcaatttatcaatatgttcgtatcgggcatgcgtaccttccagcaatggtatgattccccgcaaagccgtgatatgccccgcctttgtttccgttttcattttgtcgaataatgtgcctgcctcacaaacgctaagagtctcttttccgctcccgttgtcttgtctgattaaagtaattttcatcctatttttgtctattttttctacaattacatctacctatttaattcctgtaaagatacgcttttatcttccggtaaacaagcattttatccgataaatacctgcatattatttgcatttgccttattatttatgtatctttgcttagtagttgtcaagggctcacccgtgtgaacaaacaggctatcaattgtaaataaaaacgtctacagacgtaaacagccttgttcacatgggtgagcccttgcaaagcattagagcttaacaaaagaaacattaagcattaatgtattactatctaagagaatacataacaagaacagttcatttaaaacaaatatagagctatggcaatattattcgattggtatgaagacccgaagccttcaaacaaacagcagggagaaaacggaaacaccctgcatccgcgcatcaaatacaacggttccacagggaccgacgtactgcgccgacgtattcaagaacgttgttcactgacagaaacagacgtcacagccgtacttgatgcgctttcgcacatcatgggacaggaattggcggaaggacgccaagttcatctggacggcatcggttatttccatccctgcctgacgaccacggaacctgtaacggtagacacaaaacggaaagtgaccaaagtgaagctaaaggccattcagtttcgtgccgaccagacattgaaaaacgaattcggcgttcttaaagtgaaaaacctcaaaggtggactggatttcacccaactgacgaacgaggaaattgacctgcaactgactaagtacttccgtactcatccatttatgcggagacacgacttccaatatctttgcggaatggcaagaagtacagccatgcgacatatccgacgtctgcgcgacgagggtaaattgaaaaatatgggtggagccatgcagccgatttatgtgccgggaagtggatattatggtaagaataaagaagttagtgtgaaaacggaataagattggtcaactcaaatcaggacgagacagagtgagagtaaaaagttaccctcacctactctcacctttaccctcacacctgtaaccccgatgaataaatggattgagcacaaagggtgagggtgtgagggtaaaacgtcaccaacatttatttgaaaacattcttaatgcgagcaactattatacaagagcacctccataccgttccatattttaccggggaatcttaaccatttcaaccggctgctcctgtatcttatccaacggttgtgattgatattttacctttgagaaatcaatagcttttaagtcaatgcaacgtatcgaattgttataagctgttttataataaaccttccggttcgtgaggtcgatagctgaggtccattgcgtagcactgggaatatccggaatatcaccctgtgaatgttctataccaataggaatatcaaaattattaagcaagtggaaacattgctgcacggtatcaaagcctgtggcacgttgcggagctgtcccccggtaaaaggccgcacgcacaaaccgcgaaggaggcgtggcatcacccggaatgccgagaaaaccggagttgccaccagtaggttgcaacgtaataccgctcaatttttgcacggaagcgtcacccggatgaagattgacgtaattgttcaaatttgtaagttgccattcaaaaccgggggcattcgtcaatactcctacttcattctcataaaaatgcggcacaccacctacaatttccaacacaacctgacgccccgacggttcaccgatacgccaatgtactaccgctgtcttttccaatcctacaacacatacagaagaaagggctgccttcacctcgtcgatagtggaaaactgcgacaacagccactccgtcacttgaaggtctgccagtgtccgctggttctgtgcagcatcatacgttttatatcccccataatgaggaaagaaaaatagtccggccgaaagtccggcctcattgattccttcggcaataaattctttttgtacaacagccagaccaaccactccatattttgccgtaaacgttagtccgttgacacctgtaggagtgaatgacgtgagctgttgaccacgtggaataatcacatactcgctttgcaacacaccgcgcgcccattcaatcgtacgggcttgcacataactgccgtcacgggatgtcagcgagattcccgtacaagctacagcctgaaaagtgctgccacatacggcagcaatccctagcaataagttctttgtcatcttcatcattatttatatatttattcgctaaaaactcaatactgtataaagacaacaaaatataggttattttagttgcagacacctctctcaagaaaactattgttttttgttcgtcccgtactttgcggaacaatatacgtagtttgcttcaatatgcaatctcttttttttggttaagcaccgggaacatacggatgagtgaaccagaagcacgacccttccccctcacgggattcgactccaatctttccgcccatcctattgaccaggctttgacagatggataatcccaatccggcaccttgtacaaatgagtccagttttacaaaacgattaaatatttcatgtttttgttcatcgggaattcctttgcccgtatccgttacacaaaaacgtacctgattttcatcttccaatgaataggaaagtgtaattgagcccttagtggtaaacttcaaggcattagtcaggaaattagatagtacttgcacgattcggtttttatcagcatcaatcacaatctgcggtgaattttcatcaaaacgcagttcgaccgcactgtcacgttttttatgtgagaaggtagcaatcacttcccggcaaagttgtggtacatccactcgtcccataacaagatctatcataccggcttcgattttggaaatgtccagaatgtcggaaataaggttgagcaacagctcattgttctcctgcgctaaagacatatatacatgacgtagctccgcctcatcggtttcggcaagcagactggaaaaaccgacgatggcattcaaaggagtacgtatttcatggctcatattggcaaggaatgctgatttgagcctgtccgattcttccgctttttctttagcttgaatcagctctagttccacctgtttgcgggtggtgatatcggtagccagttccatgattgcccaacgtccgtcgagccattttattgccatgctctggatggtataccaacgtttggtgaccggattgtagtcttcccaaaaatgaacgcctgtaaacttacggttggcatcgagcaacttcggcttcgggcagtgtttacacccattttccagacctgcattcaacattctccaacattccgcatttgccggaacttctcctgcttcttccctgaaaggcttattggcaaaaatcactttcaacgtatcgtaatcactcacaaaaatattggcattgatattgtccaataccttttgcatggttcgctgtgactgttgcaacgatgtttcaacttgccagcgtttggtagcagtagatacgatttgcgatatctggctcatcagttccacatctttttcatcccattgtttgttccagcaaaagttgaacgaaagaaagccgaaatgtactcccaattgtgacaggggaaaaacagcaatggcttttacgccttgcacttcgagcatttgagtaataaagggatcaagcgaataaatatcggacgtacaaatgatatggttttcttccagcatgtcgaaccagggttttcccgcttcaatggtcatactccgcaagtaatcgatagcgggttctataccgtcgttgcaccattcgttggtgcagccatacgtaactccgtcgaggtggttttcccatgtcgccaaacggtcgacaccagtataacggccaatttcggccagtgccatattcatagcagtaggtatatccggttccaattgcaaaatttgcagtaccttgataaataatgcctgccgtcggttggttgcttcgagattctcctgaatagcgatcaagtctttagatttctcttcaaccatctgttcgaggctggtacggtactgttccagttccataccgcccccttgaggttcagaatcagtggatttcatgtttaatagataacagtaaatagaattttagtttagtttcgaatccggacgagatgcgtcccacattctgcaaatatatacatttattttagaaaccaaactttttcccatcaaaacgacttcttataaatgcctaataatcgcagaattacgaaagcatatattacataatcgacctcgtcaattccaaacttcctcaatattataccggatggaatcttttcaacaatatatgacttacactgaaaaagtccttatcacacttttctatctattaaaactaaatcctattcgtctggttatatcagtttcaaccctacgattgaaataatcagagtcgtcataaaaaacaaacgacccaaagttgccggttcatgaaagaacaggataccgatcaatacagtccccaccgctcctatccccgtccaaacaggatatgcagtgccgataggcaatgtttgcgcagcctttgccagtaggaacatgcttaaggttacagagattacaaatcccgctccccacaaataaaaatcggtgcctgtcgctcctttaatcttgcctagacaaaaggtaaaaccaacctcaaacagtccggcaataatcaatataatccaattcatatcattctattttaatattagactgcaaaattaacaagatgcccggagctttcactttacatttgataagaaacgacggtgtaagagtatcatcaaatcttcttttcctaatataactttttgtatttttgcagaataatgattcaatgcgatatggatatacacgagattataaacaggatatatcggatgccggaggcttcagcggataaggtggtcaaacatctgtcaaaaatcacatatcccaaaggttatcatatattggaggctggcaagactgaaacgaatatctttttcatcgagaaagggattgctagagcttatattcccgtagacggaaaagaggtaacgttctggattgggaaagaagggtcaaccattgtctcattgaaaagctatgtaaataatcaacaagggtatgagtcaatggaactgatggaaaactcggtgttgtatctattaaagcgcaaagacttacacgaattattcaaggaagatatccatattgccaactgggggcgcaagtttgccgaatcagagttcctgcaaacagaggaaagacttatttctctcttattcaccaccgcgtccgaacggtatatgaagctgatacaaaataatccggagctattacagagaataccattggaatgtcttgcttcttatctgggaataactccggtaagtttaagccggataagggcgaaattgaaacgggtactttgagatagaaacatatttttcaaaagcgaacagaaagtgatatagttgtgttttgaatgaatcaaaagagagaagtcatgaatatcgaagattatagagaatattgcctgtcagtcaaaggagcaacagaatgtatgccgtttgatgaacatactttggttttcaaggttatggataaaatgttcacttttgctacattacgtcctaaaaacggaagattctgggcggatatgaaatgtaatcctgataaatcagaagagctcatagaacaatacgaagacattttttggggacctttttcggataagaaacattggataaccgtttacttggaaggagatgttcccgataaactcataaaggagttgattagccgctcggtagaagaagttttaaagaagttacccaagaaaaaacaagaggaatacaagaacatgatttaggattcgaaaaatagacatatccggcactactattattgctaaaagtagagccggataaaatcactatacaccccaaaacgcacacacggataaaatcatcgtatatttaaaaacgtatgtcccaggaacacttgcattcttcattccggcaatcatgaatctggagaaaaaataaatgactaattttattaactaatgcttttttagaagcatttttttaggttattttgcggaacaaatatcacgaactcgtcaaattatggattggattggccttgatttaacattccctatcaccgaccctacatggatatttctccttgtactcttgattatattgtttgctccgatattattgaataaactgcgcatccctcatattatcggtatgatcctggcaggactggctattggcgaacatggatttaatatcctggcacgagacagcagctttcagttattcgggaaagtcggactctattacatcatgttcctggctggtctggaaatgaatatgggagatttcaaagagacgcgaaacaaagcattggtactgggattactggcttttatcgttcctatcgggattggattcatggcaaatgtatcttatctgaaatatggtgtaatcacctctgtattattagccagcatgtatgcctcccatacgctcgtggcctaccccatcgtcacccgcttcggcatatcacgccatcgtagcgtaagtattgccgtaggaggaacggccgtaacggatacactcacgctgctggtactggctgttataggcggattgttcaaaggagaaaccggaggattgttttggatttggctggtggtaaaagtaatctttctaggggcactaattatttatttctttccgcgcatcggtcgttggttctttcaccggtacaatgacaacgtgatgcaatttattttcgtgcttgcgatggtctttttaggagcagggttgatggagcttgttggtatggaaggtatcttgggagctttcctcgcaggattggtacttaaccggctcatcccccacgtctctccattgatggatcatttagagttcgttggtaatgcactttttattccttatttccttatcggagtgggaatgttaatcaacttacgtgttattttcggagagggggatgccttaaaagttgccgccgtgatgataaccatggcgctgacaggcaaatggattgcttgctggctcactcaaaagatatataagatgtctgttcttgaacgaaatctaatgtatggtttgagtaatgcacaggcggcagccacattggcggctgtattagttggatacaacattattctgcccaccggcgaacgtttattgaatgatgatgtactgaacggaacagtcttgcttatcctggttacttgcgtagtgagttcactgattaccgaacgggcagccagaaaaatggcgatggatgattcacaacctgaaaatgaatcgtcgaaagaaacagagaagattttaatatccatagccaacccggacactatcgaggacatggtaaatctttctctagtcatacgtgaccccaaattgaaagacaatctcctggcattaaatgttatcaacgacgataataactctgataatctacgaattcgaagcaaacattatctggaaaaagccgaaatgacagcaacggaagcaaatgtaccactcaaaaaggtcacccggtatgatttgaatatagcttccggtattatccattcagtcaaggagaatgagattacgagtattatcaccggcctgcaccgcaagaaaaacatcacagattcatactttggaatacttgccgaacacttattgaacggattaaactgtgaaataattatctctaaatttctgataccggtccatacaatcaaacggattgtcgttgccgtccctcctaaagccgaatatgaatccggctttccgcattggatggaacacttctgtcgcatggggagcactcttggatgccgcgtacacttctttgccaatgaaaagactaccatccgcctacaagcgtggataaagaaaaggcataaacagacgcttaccgatttctctctcttagaagactggaatgacctgctggtattgacaggacaggtaagttacgatcatttattggttattatcagtgcacgaccaggaactctttcgtatgacagttcttttgagaagttaccgagacagctcgggaaatatttctccaacaatagcttcatcgtgctgtatcctaaccagtcgggagagccgttggatacgtctttcttctccaagctatatactgataccgaaacccgacattatgagaaggtgggcaaatggttttacaggtggtttaagaaagagggataaaattagaattgaaaagttccgtttaatttataaatatcgacacatttatctatatttgtaccattagcaattttgctataaacacctaaaggaaaagaatggtatgtcaaacgtcgatttttccaaaataacagaaggaatctatcatgtgatagaaactgaagagaaaatactaaccgggctacaaaatgatacgatcacgttgaaacgtaataaacaaaatcgtaccatcaaacagattctcggacatttgattgattcggcatcaaacaatcaccaacgcatggtcagattgcaatacagtaaagatttgcttttctttcccgattaccgtcaggataatgatctgtggatagcattacaagattaccaaaatgaagattggaacaacctgattcaactatggaagttttttaacctgcatatcattcaggttataaaatctgtagaccagacaaaactggatagctactggtgtgattttgaaggaacaaaggttacgctacaagacatgatagaaggttatctaagtcatttgcacctgcatattcatgaaatccatgaattaatgaatgcctaaaaaggatagcggttgcagttcttttatattctataaatattaagatgtacccacatggcaacttacactcatttcgcaaaacaacccgatgtactgaaacatctgatactctgtgaagttcttagaaatgaagccccacaagtatatgtagaaaccaattccgcatgtgccatctactccatgacgcaaactccggagcagcaatatggtatctatcatttcctggagaaagcagatgatgacaaatctctaaaagattccatttattaccaactggaaaacccggaaatgacaaaaggaaattatctgggttctcctgccctggcaatgaatgtattagagaagcaagcaaaaaggtttgtattctttgatttagaaaagagtgcgttggaaaatgtgggtacctatgccaaacaagtcggattaagtgcatctgtagagatgcatcatgccgactcttcgagaggtaccatagagctattgccttcacttccttcatcctctttcattcatatcgatccttacgaaatagacaagaaaggagattcaggagtaacctatctcgatatcctgatacaggctactcaattaggaatgaagtgtttattatggtatggattcatgaccgaagatgataaagaatctttggacaactatattgtatccagtctggaaaaggcaggtatcaaggattacataggtgtagagcttactatgaattcaataagaaaagacagtatattatgtaatccgggcattttgggaagtggtattttggctacaaatttatcacaaatctccaaagataccattcttgattacagtaacaaactggttgatatatacaaagatgctaaatacaaagattatgatggaagtttatatattcagcatctttgatatccacttattaatttaattacctagaacattactctacaaacagagcgtcagaaagccggagcttttaaaatcagtttccggccttttggctataaattaacttatttctttggctgattgtccacaaaccatctattagccgtacatttttcgtatcgtcatcttccacgttccatgcataacctcctgaaggcaggccacgtctctccaatatttcattgggctgattattggaaaagaaaagttccagttgcgtagagtcaggactaaacacaataaaggcagaagcattgctatcgtccaccgattccgtgcggattcctttctcaaacaagcggatacagtctttttgcacttcacaccatacatatccggcagaaccgatacagccatgttcatcccgatcacctcccacaatcggagattgcggatactgaactaatttagaagccggcattcccggtgtatattttccggtatagaacacttccagcgtatcattcagaagcaaaccgttgacttcatctttatttgcatccatcgtactgaacgaaagggtatcattcttatcagtaacaatcgttaccgtattcatggttgcatcactaacgattccttttgagcttgccacttttgacgagcaacctgccatgaggcagagcgtacctactgctaataatattgttttcattttctttaattggggctttgttttaaaattaatgcaaagataaaggttatacagccaatatttcgcttttacaaaataaattaatttccgggcagattgttcaccagctacacacaaaatgcctatattggacaacgatctattagaaaatcagcctacctttgtgatatggataatcaaaagtaaatacagaataccatgaaagaaactttgcagattcccactcccgaaacactggaagccttgataggtaaggaactttatgatatatggacttcactttgccagcttatcgagcaaaagtacaatatggaacaactatggaaccatggaggaaaaaaatggatatacgaatataaatatcgcaaaggcggaaaaacgctgtgtgccctatacgccaaagaacaaacgattggtttcttggtcattttaggtaaagatgagcgtaccaaatttgaatctctgcgagaagtattctccaatgagactcaaaagatatacgatgagacgactactttccacgatgggaagtggcttatgttcgaattgaaagacacttatttatttaatgatatggagcgactgctatccatcaaacgaaaacccaaccgatgattgaatcagatataaataaaaggtattgtcaaagttgcgggatgcctctccgctttgatatagagaaatatctgggtactaactccgacggttcccgaagtgatgaatattgctactactgcctgaaagatggaaaatatatcgtcgacattccgatgtcggaaatgattaatatctggataaaatacaccgataagtacaatgaatatgcagataccgcttattcgccgaaggaacttagacgaatactcaacgaacggctccccaaactgaaccgatggaaacagaagttggaaaccagtaatatccatcaccaaaagattcaggatatagtcgtttacatcaacaatcatttattcgatagtttagatgcagatatacttagtacgataagcggactttccaaatatcacttcagaagagtgtttcaaaccgttgccggagaaaatattggaagctacatacaacgtttgcgcctcgaacatatagcacatctgttagtatccaccgactttacattaaatcagatttcggagcaaacaaactatcagactaaattcagtctggcaaaagccttcaaaaaacattttggagtgtcaacctctcaatatagggagaagtataagccgatgtatgacgaacagcatgcggttatcactcctgaaatccggtcgattctgccgatgaaagtattttgtatcgaggtgggtgaaaagtataaggatgaactccgatacaaattaatatgggacaggctcaccaactatgctagacagcgcaatgaagaaaagtcgaatgataagtttgtcagccttagtatggacgacccggccatcaccccaatagataaatgtcgcttctatctcggggtcataatcgataacaaagaaaatgatttccagccgggagtgatagaagttcccggtggtcgttatgctatattcaggcatatcggtgactactctttattgcataaattctaccggactatttatgaagagtggttcccggaaagtaaatatcgtcctcaaagcacctttagctttgaaatgtatatgaaccgccctgcctccacccttagaacagaactaattaccgacatctatattccggtcatcaagaaataattaattatcaaccctctaaaaacaatgtattatgggaaaaatttcagaaatcatgctattgaagcaaccgaaacagcccgctttggctgttgaagtacaaacagatatgaacggaatgtcggaagctatcggaaagaactttgtaaaaatagactctttatttaaggaacagggtgaagtcactaccgacatcccctacgttgaatatcccaactttgaaagtctgacggaacacaatatcaaaatgattatcggtctaaagtcatccaaagaattacaaggtgaaggggatatacgatctataacgataccggaaagaaaaatagtttcctgtttgcatagaggaacttacagtgaattggctgtcctatacaacgaaatgatggaatggataaaagccaacggttacaaaccttcgggaacatccattgaatattattacagcaatcccaatgtacccgaagaagaacaggtgacgagaatagaaatgccactattataaatgttgatttcatctacttcatcatgtagattcttcccaagctccaattattgttatttgattcaaaacggtacagaaaggaatggaacagattcttttataaatgccatattttagttctaatgtaaatattattgcagtaatagatgcaatagaaataaacggtgttgccaaaaaaaatgtcaacaaaattcctatgtattcctgatagataacattattttgtaaagcactgttatccaggcggttactattcgggcttttcctttaaaaccaataacccgtttctcaccgagaaacaaccttttcgacaccgagaaacgaagtgtttctcaccgagaaacgaatcgactgttgaagtcctaaacttaaattaagaaaattgttcgtctcttttatttttgacgcttctatcgtaggaatgtatatgttgaaatatatttcaatgataatcttgtcatgtctaaaatataatgatatggaataaatttataactgaatagcaagcaattataaaaaatgactgaatgaattatttgcaatcaaacaacaacagatacagacatcatttttgtatctttgccaagtacagaataaacatgaaaagagaaatcctatatcaaaagatagccggcactatcgcctggcaaataaaaacaggtatatggaaagcaggcgagaaattaccttctttacgtactatcagcaatgaatatggcgtaagtttaaatacagccattcaggtatattatgaactggaaaaggaaggattcatcatttcccgccccaaatcagggtacattgtcaattataagccactaaatttgtctgcgccggcaacaacgcagccttccgctcaatctccgggaaaggaagaagcagacttaatcatggaagtatatcattccatcgaagattcgtctatcacccgtttttcgctgggaataccggaagatgttttattgcctattgccaaactcaataaagaactgaccaaggccatgtattcacttccggggaacggcactaggtatgaagaccctcaaggaaacattcgtttgagaaactatattgcccgttttgcgtatagctggaatggaaatctgaccgaagatgatattgttactaccacaggagtaaccaattccatctctttagcattatctgttattgctcaaagaggagacacgatagctgttgaaagtcctgtttatttcgggatattacagttggccaacagtatggagcttcatgtgctggaactgccgaccaatcctgtaacaggcatcgaacccgatgctttaagaaaagtattgccgcagatcaatctatgcctgcttatcagtaatttcagtaatccgcttgggagttgcatgcccgatgaacataagaaagagatagtacagatgttggcggaacacaatattcctctgattgaagatgatttatacggcgatgtattcttcggacattcacgccctaagccatgcaaagctttcgatgaaaagggacttgtgttatggtgtggttctgtatcaaagacgttagctcccggttatcgggtaggctggattgcccccggtaagtttaaggatgctattattcgtcagaaacatattcatttaatatccactcctaccctcaaccaagaagccattgccaacttcatggagaacggcaggtatgagaatcatttacgcaagttgcgccatgagctacattccaatagtcttcatttggcacaagctattaccgactattttcccgaagacactaaaatcatcactccacaaggaggttttatgctttgggtggaactgaataaaaagattgataccacggagctatattacaaagcgatgcaacataagatcagcattgctcccggacgcatgtttactctgcacgaccagtacagaaactgtatgcgcttgagtttcggtcagcaatggagtgctttcattgaagaacgcttgcaggttttgggaaacattatcaaagaatcattttgattgactgatatactcctttaccacttcgccgagggttttaagtcctttctctattttgtcttcgggcatattagagtagttgatccgaagcgtattttccttgtttccgttcggataaaaggagcctcccggaacaaaagcaatctttttctccaggcttctgactaaaacatcacgtgccgaaatcccttcgggaagttctatccatgtaaataatccgccttcgggacgagtaaactttatagtatcaggaaaataacgttctatactttcaatcgccacatttctgcgttttctgtatacttctactattttggcaatatgtttatcaatatcatagcgcttcaggtattcggcgatggtcatttgggcaatagtgttgcattgtaaatccgtaccttgcttgaccaatacgtatttgcggataatctctttatcccccgcaatccagccaatccggaaaccgggacagaatattttcgagaaactacctgtacacaggatatttccagcctcatcaaaagactttatagatggcaaagactctccttcaaaccttaactcgccgtacggattgtcttcaataaccgcaacaccatactttgcggataattcagccagcttcctgcgtctttccaaactccacgtttttcctgtaggattttgaaaagtaggtattgcatatatcagctttatatgaggagtattgctcaaaacatcttccaaaacatccatcatcataccgtccccatccgtaggaagttcaataaagctacatccatacgctttgaatgcactgattgcagccaaatacgtagggctttcgcaaagtacgatgtctccctcgtccaggaaaacttttccggataagtccaatccttgttgcgagccatgggtaatcagaatattatctttatcgaaagtcgtgcccaaacgttcgttcatccggttggcaattcattcgcgcaaagggacataaccttctgttgtggtatattggagcgctttcgtacctgcctctttcaatacgatctgattgatctcattgatttcatctatcggaaaaagttccggagcaggcagaccacctgcaaacgaaatcacatcttcctgttcggtaacttttaatatttctcttatttccgaagcctttatataagacattcttttagcaaaattcaacttcataacctttaagtatattaggagattaaaacaacactgcaaagtaaatcaaaaaagaaagacgagaacagatacacttttttatatattgacaggtacagatgactgacttttcaaaggataagtatatgaagttaatctccccgattgcttatttcgtcatgagtaatcagggtattcgtcgaataatcctatacagaaccttgtttaaacctacctttgcactgaaaacaaaagtaattgatagtaactatggaagagcaaatactcatttttcgaacctcggttagaaatgcacgggatataaaacatatcgcagcgctgttcaccctatgtccccaaatctacaaatggaatgtagatatagaggactgggaaaaagtattgagaatagaatgtcagggcatcaccccgactgaaatatcaaaggcattacgcgctatcaacatttatgcgcaggaactggaatgaaggggcaatgcgccccttaataaattcaccatccacctttttcattttcactcttcaatcattaattccatctgtatgtctcctctttcataagtcgtgtgatattcgggaagttccttgaagcccaacttatgataaatatggatagccggtttcagacgcgtattgctctctataaagattcttttaccaccaagctccttcgctttatttacaactgcttcgcaaagcagtactccaatacctttgccctgaaccttagggctgacagccagtttggccaactcataatcataaagcggatgatccatcttacacaaagcacatacaccgaccggctcatctttataaagagccaccaaaatagctcctcccttatccagaatatattcctttggatgatccaaagccttgtaatcggcctcttccatccgaaaataagcagttatccactcttcgttaagggtccggaaggcagattgatagcaaggttcataaggaactattttgatgtccttactctctcgttcctttttcgcttccttcacccgctccaacagggatttatccaacaaaagattctcccattcttcgatagcctcccaaaggtcattccgggtttgctgcgtgatttgctcaatagctgccgtaacatctatacactgttccgaaaaagagtcggacattctttttcctttggcagataacatgaccatgtttcttctcccgtcggatttgtcctttgtctccttcactaatcctttagctaccatttctttaataatattactcacggaaggatgagaatgaccaatctctttggctatggacgtaatggtttttgcctccccacgtgataatacaaaaaatacaggaaaccatttcggtttgaggtctactccaaacattttatagatggcggctgcatctactgttattttatcggtcaacatgcgtaatctgctaccgatggctaatttgcctgtctgattaaaaaagtccatgtttttattagttgcgtcactaaatacgtaattgattacgcaaatatattagctttttataatatgaacaaacatttttcgcaaaaatacgtaagccgttacataattagttctatttatggataaacatcaggaaatttagcttatgtgcaaagtgctcctttggatttttcccaatattttggggaactgccagaagaacaacaaagtacaacaaattgccgctgtcgcatcggatattgcttcagccgcatatacaccggctactcccataaaatgtggcaatattaatgccaatgggatcaataggattgctttgcgcaacaaggctatgaaaatagaaatttttgcttgtcccaaggctacaaacatattttggcaggctcgttgcaatccgaaaatagtcataccacccaagaaaacaggcattgcccagcggactgtttctatcaatctttcatcactcgtaaaggcggaagctactgttgaggggaaaagaatcataaacaacatcagcagtaagttgaatgagaacatggttatcaatgcgacacggaaacagtctttgacacgttgtttatcgccgtgcccataattataactcacaataggaacgaacccttgcgcaaatcctgttaatgggacacttgcaaattgcatcgcactttgcaagatggtcaatgcgctgacataaatatctccaaaatctttcaggctgctgttcagaacaaagccgaccaggctttcggtacttgccataataaacggtgatacgcccaaagcaaatatagaaagtattatttcccggttcaacgccatataacgtttttctaaagggagagaggcgtgccgggagaaaaggaaagttaaaacccacactgcactacatgcctgtgaaagcactgtagccagagctgcaccttttactcccatatcgagccaaaaaatgaaaatcgggtcgaggacgatattcaacagtgctcctattaataccgagtacatggcgatagcaggacgcccttgtgcattgataaaagaatttaatcctgtggatatttctacgaagatagttcctaataaatagatagaaagatagtcgactgcatactccaatgtattttctgaagctcctgtaaaaagtagaaccggctccataaaggtatatgcgatgagagaagtaaacaaggtgaatagtatcagcaggataaaaccattacccagaatttttccggcacgtgaacgatccccctgtccgagtgcgatagccgctaacggcgcaccgccacctcctactatcgctgaaaaagaagaaatcagtataacaagagaagtcgttactcctacacccgccaatgcatccgtaccaatcccagggatatgaccaatataaatacggtcgaccatgctataaagcaaattaacaaattgcgctgccacagccggaagtgccatcttaaaaacaagcggtaacatgcgctctgtccccagtcgttcttcatatttatttatcatcccaaacttctttttctaaaatcagttgcaaagttataagaaaaacaggcttccgatttaaaaccattggataaaataaatataatacatcagttatctccgtgtaagaaatccatagatatactgattgataaggttgtgttgttcttccgttccattctcccccatattactatgcgttattccgtccaatttcacaaccttcatccggaattgttcctgctccttttcagtgggtaatactcctgaatccgcatcataatcgcatcctcttaacgtataaagtcgaggattccgtgttctaggcattatcattctgcgatgatccatagatatggctttatttatcaactgcggatatcgggtagcaaataacatggtcatatctccgccattggaatgtcctatcaatataaagtcattccaatttaattgtggcttcaatttcttaaattcctgaatagtaaaaagaatatttgccactcccctttcccaatttggcatgcgtgtttccatgaaattaccttccatggccaaaagaggatcatctgccaattcatgttgtatgcttattacgtaaaagcctttctgggaaaggaatcgtgttagataggcataagtctgattggacttattatttttatttccatcgtagccgtggctaaatataatgacttttgttttcgaattcactttgtgcggctgatagacggctagcggtatcactctgtttcttgaagcatcaaaaaggcaagtcgaaaactctatttgtgagaaacaagagagtgctgataataaaagaacaaatacaataattagtttcttcatgtctatgatgtgatatttattattctataaatctaagagcaactgaattataacaatgaatgcataatgtaaggaagggattataaaatgattttctcataaagtttgaaccactctaaaccgtaatgacccaatcctaaatctacggtatcaatgtattcgaacccacacttttcgtacaatgaaatagccggaagatttttctcgtaaacatctaaccgcacagactttatccccgaactttgagccaattccaatgaataatccattaatgcatgccctactcctattttcaaaaaagaaggatgtacaacaaaagtatgtatcacaaagatatgactatagtccagttctattttccatttgacattctcataagccttttccggttgatgatttaaaatgactgaaccgacaattcttccatcatatcttgctacgtaaagcgtttcatcatttacaccggcaaccgcatcttcccgaacaggataaacaccttttatccacccgggataattagtcgtagcagccagataatcattcagttcatcatacagcttttccagttcatctatatcagcagaagttccgggctctattgtaaatttcatatatacacactgtttatctttttatcagttcttcaatctttccacctgtaatataaggtatacattcggatatcttctcaatactccaatcccaccattgcaatttctgcaattggacaatcgtattctcatcaaaacgcttccggatttctttggctggtgtcccacctactatcgtataaggaggaacatctttagtaaccactgcccgcgacgcaataaccgctccatctccgatatgaactcctgccatgataacagcttcatatccaatccagacatcattacctattactatatcccctttattatcccaagcagaagttacatctcctttatctaaattccattcctcaaaaaagataggaaacgtataattggataaagaacccaatgtgtggtttgcgctgttaaaaagaaatttggctccacaagcaatggaacagaatttgccaattatcaatcggtctttattaatcggataatgatataatacattgttcttctcaaaaagaacaggatcatttacaaagtcattgtatattgtataatcacctaccataatggcaggattcttaatcactgtattcagataaacagtctggaaatcattggtgcgaggatatgtttttgaattcattgtgtcagcagaagaggatttatattacatagcaaatatacaagataaatttcagactatcacacaacgaactaaatatgtatcccatattgatgcttcacttcagccattacaaacgtgctttccagtgatcctaagctatcaatcgtccccaacacattcagaataaactcctgatagtatttcatattgggagcatgaatcttcaacaggtaatcataacttcctgatatgttataacattcggttacttcaggaatatcctgtataatccgtgtaaactcggctgctatatccctgttcagacgtctaagcttcacactgcagaatacgacaaatccctgattcagcttttccgcatccaatacggcaatatacttctttatatatcctccactctccaaccgtttaagacgttcaaaaacaggagttgaagaaaggctcacccgtgcagccaactcttttgtcgtcaatcgggcgttttcttgcaaagtacggagtatttgcaaatcgactctatccagtttatcaaaagtatccataagaaaaatattcttctaaaaggtgatttctaggaatagcacagttatattattccatataatggcacaaaaatagcattattttctatattttagatatatattgttcgatatatcttcatccaataactttgcaagaaaataaagaaagaatattaaacttaaaaaatatacgattatggcaacaaagaatttacatttcgagactttacaagttcatgtaggacaagaacaagcagatccggcaacagatgcccgtgcagtacctatttatcagactacttcttatgtatttcacaactccgctcacgcagccgcacgtttcggcctgcaggacccgggaaacatctacggtcgtctgaccaactccactcaaggagtttttgaacaacgcgtagccgctcttgaaggaggagtagcagggctggcagttgcttcgggtgccgctgctatcacttatgctttcgagaacatcactcgtgcaggcgaccatattgtggcagccaaaactatttatggaggaagctataacttactggctcataccttacccagttatggcatcacaacaacattcgttgatccaagtgatttatcgaactttgaaaaagccattcaggaaaatacgaaagccgtatttatcgagacattgggaaatccgaactcaaatatcattgatatagaggcagtagctgaaatagcccaccgccacaaaatacctttgattattgacaacacatttggtaccccgtatttaatccgccctatcgaacacggagcagatatcgtagtacattccgcaacaaaattcattggcggacacggttcgtcattaggaggagtcattgtagattcgggcaaattcgactgggtagcttccggcaaatttccacaactaaccgaacctgatccatgctatcatggcgtacgcttcgttgatgcagccggtccggctgcctatgccatccgtatccgggctattctgctgcgcgacacaggtgccaccatcagtccattcaacgcttttatcctgttgcaaggcttggaaactctttccttgcgcgtagaacgccatgtagaaaatgcattgaaggtagtgaatttcttaaacaatcatccgaaagtgaagaaagtgaaccatccgtcattatccaatcatcctgaccatgcactgtatcaacgttacttcccgaatggtgccggttccatttttactttcgaggtaaaaggcggacaagaggaagcacaccgcttcatcgacagcctggagattttctccctgcttgccaatgttgccgatgtgaaatcattggtgatccacccggcaagcactacccattcacagctcaatgcacaggaactcgccgaacaggagatttatccgggcaccgtacgtttatcaattggaacggaacatattgatgacctgattgcggatttggatcaggcgcttgccaaaatctaacattcaatcattgaactttccatgactgcaagatgttatacctatataacattaaaaacattgcagtcatggaaaaatatttaatacacagcaacgaactgcatctgatagacgcagagaaaatccatcaagccgtagaaaagatggtggaatcactcgatttagccgcaggatcaaccactaacttcgatctctatcaggttgtggaaaactactttaaagatctcgagaaaaggagaaaaattaatcatgtactgggaatcaaagaagatagatatgaactagccgaagatttcggtataaaataaaaaagagatttattcaatcacaccagacaagttttccaaaaaataagggagttgcacgttaagtacaactcccttattttttgaattatcagagtataacaatcaatttccctgatgcacagtaagctgtgggaaagggaagttgatacctttttcattgaaggtttcgtaaatagctttattggtatcgaaataaacaccccaataatctccgctatttacccatacacgtaccaccacattcacactgctggcatctagcgcatgaagagctataaacggagcaggttcattcaagatacgtttatcttcagccagaatatcacgaactatctgctgaaccttattgtaatcttccccataatctataccaataatccattctacacggcgggtttcctggtgactgtaattaatcactactccactacttaatgaaccattcggtatataaatcagtttattatccccagtagtaaggatggtatggaatatctgaatttcttttactgtaccggctgatccctgctgtgtttctatccaatcgccaactttataaggtttgaacaaaagaataaccagtccaccggcaaagttttgcagattaccggataaagccataccgacagcgacaccggcggaagccaataaagccgcaaatgaagttgtctcaactcccaaggcaccgacaacagaaatgattaacaggattgtcaacagaatattgaccagacttctaacgaaagttttgatacttacatctacttttcgtttatccatcagacgcctgatgaatttgttgagcagcgagatgaggaaacgtccgacgacaaagacaaggaccgcaatcaatatacgttctccggcacgaataccgaagtctatcaattgttgagtaatcagcgaaagcttatccaatccgtcagcattggcaatcgcctctttcattaattcgtctgcagccacttgcacagagtccgcagcttgtgttgcttgcaataatagtagcataattaaatatatattaagtgaataaatgcagttttgttatttcaacaatttacaaagttatattgtttttagtgaatctaaaagttttttttgctttcctcctgcaaaagcagtatttttgtcaccgattcactggtaggggtgccttaacatgacgggctgagaacatacccatagaatctgatccgggtaatgccggcgtagagaactaattagtaagcaaaaatgaaaagaattgtatggatggccgtcgccttattgggcgcaggtatcactgttcatgcacagacgagtgcaaaggatagtatgagagtagtaaacctgcaagaggtgcaggtagtgtccacacgtgccacagccaaaactcccgtggcattcaccaatataggcaaagcagaactcaaaaaggtaaacttcggacaggatatcccctatctgctaagtatgactccttccacactgaccacatcggatgcaggagctggtatcggctatacgacacttcgcgtacgtggaaccgatggcacacgaatcaacatcacggtaaacggcataccgatgaacgatgccgaaagccataacctgttctgggtgaatatgcccgacttttcttcttccgtaaaagatatgcaggtgcagcgcggagcaggtacatcgacgaacggagcaggtgctttcggagccagtgtcaatatgcaaaccgaaggtgcatctatgaaaccatacgccgaattcaatggttcatacggttcgttcaacacgcacaaggaaacagtgaaagtgggaaccggcctactcaataaccactggacgtttgacgcccgcctttccaatatcggtacggacggatacatagaccgtgcttcggtggacttgaactcttactacctgcaaggaggttattttgcagaaaacacatctgtgaagctcattgcatttgccggaaaagaaaaaacatatcatgcttggggatacgcaacaaaagagcaaatggaaaaattcggcagacgctacaatccttgcggggaaatgtacactgatgccaacggcaaaaaatattattacgacgaccaaacagataattatctgcaaaagaattatcagcttctcttcaatcatactttctcgacagcctggaatctgaacgttgccttacattataccaaaggtgacggttattacgaagagtacaaagacggcagatacctgatagaatatggtttaaaaccatttacaatagatggaaccgaagtatctaaaagcgatttagtccgtcaaaagaagatggacaacaaattcggcggcggcgttttttctctcaattacacggccaacaggctaaatgcgtctctgggaggtggtttgaatcaataccggggcaataacttcggaagagttccctgggtgaaaaactacgtaggttctctatctcccgaccatgaatattaccgcaacaaatccaagaagaccgatggaaatatttatctgaaagcgaactacgatcttactagaggactaagtgcttatgccgatctccagtatcgccacatcaactataccatcgacggaaacaatgataaatatgactggagcaagaatgccctgcgtccactggcagtagataaaaagttcgatttctttaatccgaaagtaggattaaactggaacatcacttccaaccatcgtgtctatgcctctttctcggttgctcaaaaagagccaacaagaaacaattatacggatggtgatccggactcgtaccccaaagcagaaaagctgctcgactatgaagcaggatataccttcgccaaccaatggctgacagcaggtgcaaacttctactacatggactataccgaccaactggttctgaccggagccttaaacgatataggtgaagcactgaccgaaaacgtgccggacagttatcgcatgggaatcgaaatcatgctgggaatcaaaccgtgcaaatggtttcaatgggatatcaacgctacatggagcaaaaaccgtattcaggatttcgtagagagcctgccgggctaccactataatgacgacggtagctctacttctctcccgactattcagataaagcataaagacactcacattgctttctcaccggacttcttactcaacaatcgtttctcattcaattataagggattcgaagctgccctgcaatcacagttcgtgagcaaacagtatatgacaaacgcagaagttgaagaactgactcttgataagtattttgtcagcaacctcaatctggcgtacagcttccgtcccaagaaagtactgaaagaagtcaccgtaggatttactgtatacaatctgtttaatgaaaaatatgaaaacaacggctgggcatcaagtgactacaccgatacgctggaaaatcggggaaactatgccggatatgctgcacaagcaggaacaaacgttatgggacatgtttctttccgcttttaatcacacagagttatggaattgaattttctggaaatattcggtacgattgtcgggctgatctacctttggttagagtaccgggcaagtatctacctttggatagcgggcattgtgatgcctgccatctacatcttcgtatattacaaagccggattgtatgctgactttggcatcaatatctactacctgatagctgccatttacggctggttcttctggatgtggggaggggaaaaatccaaagatcttcctatcatacatactccgggaaaatgttacttacctctttttctgatattcatcgtttctttcctcggtattgcatggatactgatagcatatacggatagcaatgttccttggctagatagctttactaccgcattaagtattgtcggcatgtggatgctggcacgcaaatacgtcgagcaatggtttgcctggattcttgtggatattgtctgctgcggactttatatctacaaagacctttattttacttccgctttgtatggactttactccattatagctatctttggctattttaagtggaaaaaattaatgagcatacaatgaaatacgaacactatactcccgaagccgtgatactagccaatggcgaatatcccagccatcctcttcccctgcaaatgctgaaaaatgcagaatttgtagtttgttgtgacggggctgccaatgaatatatcctgcgtgggcatacccccgatgtaattatcggtgacggggattctctttcaccggaatataaagaacttttctcccctattgtacatcagatagcggatcaagaaacgaacgaccaaaccaaagctgttcatttcctgcaaaagaaaggattccgaagaattgccattgtcggagccaccggcaaacgggaagatcatacattaggaaacatcagtctgctgatcgactacatgaaagatggtatcgaggtacgtaccattaccgattatggtatgtttatccccgccaaagacacgcaagctttcgcctctcatccggggcaacaagtttctattttcaatttcggagcgaaaggattgcaaggagagggattagtttatcctcttagtgattttactaattggtggcaaggaacgcttaatgaagcaacagcaaatgagtttactgttcattgtacgggagaatatttagtattcttagcttctatataaactatattgcaattatccggtttatgccaccctattgtcacaattgtgccaccttgttggcacgaccgtgacacttcgatggcacaaccgtgccaacaaggtggcacaaattcattcataggaagaagaggattaaagcgtcaacaaatacttcttgaagtccgcaaagtcatttgtcatttgaaggctttttttctcgcctttcataaattcctgcaatttggcagggatttctaccgcttctccaataatgctttccactgtttcgaggaacttggcaggatgagccgtttcaaggaatacacctgtttctccctctttcaagccttctaccaacgcacgatatccacaagcaccatgaggatcaaggagataatgatgttctttccaggtttccttcaccgtttcgcggatttgctcatcggtataagttgttcctgaaatctcggcagagatatcagcatgtgaaccactatataaatcgagtacgcgggcaaagttactcggatcgcctacgtccatagcattagcaatcgttgcgatagacggacggggattatatttacctgtctgcagatattgatagaaaatatcgttgcggttattggcagcaatgaaacgcttcacgggtaaacccatcttcttgccaaacaatccggcggtgatatttccgaagtttccactaggtacacagattacagcattatcagcttttccggcacgtttcaattgtgcataagcatagaaataatagaatgcctgcggcaagaaacgggctacattgatggagttggcagaagtcaacgaaaggtgttcattcaattctttatccatgaaagcagatttcaccaatgcctgacaatcatcaaatgttccgtccacttcaagcgcagtaatattctgtccgagcgtagtgaattgcttctcctgtatttcgctcacttttcctttcggataaagcacatacacatgaataccttccacacccagaaagccgttggcaacagcacttcccgtatcaccggaagtagctaccaatacattgacattcttttgtccttcttttttaatgaagtatcccaaaagacgcgccatgaaacgaccgcctacatctttaaatgctaacgtcggtccgtggaaaagttcaagtgaatagatgttatctgccaccttaaccaaaggtacatcgaaacttaatgtatcatatacaatctgtttcagcgtatcggcaggaatatcctcaccgaagaaagcatcggctacgcgataagcaatttcctgaaaggataaactatcaatcgtatcgtaaaagtcctgtggaagaggtttgatagacataggcataaacagccctttgtcggcagcaagcccttttaccaccgcttcttgcagtgaggcaacaggtgcttgtttattcgtactataatatttcataatctgtggtgacttatttcatgaattcttttataaactcgtcttctttcagaagtccgtaactaccgttgcaagcggctatttcatcatacgtctgcacttcgtccggctcgatacccggataccagataagaaacggaatgggatcagatgtatgagtacgaagctcacagggagtaggatgatcgggcaatacagcaatggctaccggttcgtcccaatctttcactgcttcataaataggtcctacggcacgtttatcaagattctcgatagtgagaagtttcaagtcgatgtctccttcgtgtccggcctcatcactggcttcgatatgcagataaacaaaatcatccgtcttcaatgcttccaaggcagcggtcactttgttttcatagttcgtattataaagtccggtcgctccctctactgcgatgcgacgtaaatcagcataataaccgattccgtttatcagatcgacagccgagatgactgctcctttctttacctgtgggaaagtctcggagaaagtaggcatctgcggacggtaaccgggactccagggccaaatactgttcgcaggatctttaccttctgccatacgtttcagattcaatggatgatctttcagcagttcctgtgatttcagaatcaggtcgttaatcagatctgccgtttcttgcgcttccggaaccaatggtttcaccatcaatggacggaaaggtttcaaaggtacatcatgcggaggtgtacaatccagttctttattacctcccttgataaccaatagatggcggtactgaactcctgtatgaaagcgtacgcggtcattgcccagtttttcttgcaaatattgaatcaatacatctgcttcttccgtagatatatgtccggaggagtgattcttcagaatatctccttccacacaaatcaaattacagcgcattgccatctcacccggtttcagatccacaccaatactggcagcttccagcggtccgcgaccttcatatacctttggcaaattatatcccaacacggacatattggcaacttcactacccggatggaaaccttccgccacagtaatcaggcggccgttacgtcccatgcgagctagcttatccatataaggcgtctttgcatattgcaggagcgtcttgtcccctaatgactttactggccaatcggccattccgtctcccaatatgataatatgcttcataaattgaaaattgagaattgagaattaaaaaatgaaagaaagccttagatccgtttccgaatggtatttctcaatttttaattctcaatttttaatttattaaacgtttgcgatactcatgatgtcggcaaatactccggcagccgttacgccggcaccggcaccgtatccttgaatcatcatcggatattctttatagcgttccgtagtgagcaggataatattgttgctgccttccaagccgtagaacggatggttggctcctacttcctgcaggccgacggaggcttttccattctccagtttggcgacgaaacgccagtgcttgttttctttttccaatacctggcgacgggcttcaaagtctgcgtcgagacttggaacacgtttccagaaatcttccagagaaccttcgaagaagtcattcggaacaaagaggttcttttcaacatcttcctgttccagacggtatccggcttcacgtgccagaatcaccagtttacggatcacatcttttccactcaagtcaatacgtgggtccggttcagagtagcgttcttcctgtgccattttgatggtacggctgaaaggaatatcggcgctgattttattaaatatatagttcagtgtaccggaaagcaccgcttcaatcttcagaatcttgtcaccgctatgaatcaggtcattaattgtattgatgatcggaagacctgcacctacgtttgtttcgaacagatacttcacaccccgttggcgggcaatcgttttcagttcacgatagttttcataagcggaagaagccgcaatcttattggctgctaccacagagatattgtgttgcaggaaatctttgtaaagcgatgcgatgtcagcgctggccgtacagtctacaaatacagaattaaagatattcattccgataatctcgtcgcggatggtttgcaagctgctgtccttgcccttttccaacagttcttcacggaagttggcgaggtcgaaaccttcacggctgaacattgccttggctgcatcaatgatgcctactacatggagtttcagtccgttttccatcatcagcttttgttgctggcaacgaatctgttctaccagactgccccctaccgtaccgacaccacagataaagaggttcaatacctgatattcggagaggaagaaagagtcgtggattacgttcaatgatttacgcaaggatttggaatcgacaacaaaagagatattagtttccgaagctccctgtgcgcaagcgataacgttgataccattacgtcccagtgtaccgaaaagtttacctgcgatacccggtgtatgtttcatattctcacctacgatagccactgttgccagatttctttccgccagaatcggagaaatctcccccatctctatttctttcgcaaattcttcgttcagcacttcacaagccaggtcggcatcggcattacgcacaccgatagaagtactgttttccgatgaagcctgtgagacgaggaacacgctgattccattctttgccaatgctttaaaaatgcggtagtttacaccgatcacacctaccataccaagaccctgaacagtaatcagacttgtgtcgttgatggaggaaatccccttgatagccttgctctgcgggttggaaacttcttgtttgataaccgttcccactccatccgggttgaatgtattctttattataataggaatattcttgtgacatacgggatagatagtcggcggataaaccacctttgcgccgaagttacaaagttcggtcgcttctacgtaactcaattccgtaatcgtataagcagtcgaaatgacacgcggatcagccgtcataaatccgtctacgtccgtccagatttccagacttgccgcatccagcgccgcagcaataatggcagccgtatagtccgagccaccgcgtccgaggtttgttacatcccctgtcgttttatccgaagagatgaatcccggcaccagcgctactttaggaatagactggaaagcctctttcaccagtttattagtcaattctgtatccagcgtgtgcttgctatgctttctttccgtcttgataaaagtgcgcgaatcgaaccattttgctccctcaatcagtgcggtaacgatgatcgatgaaaggcgttcaccatagctgacgattgtatccgaagttttcggggaaaggtctttaatcaggtaaattccctgaaagatatccttcaattcgttcagcagctcgccaatctgacgttgcaacgatacttgcttttctccggcaggaatcacctccttaatcatctccacatgacggtaaacgatttcgcgaaactcaccctcataggctgaatctcccactgccgccatcttcgatgtatttatcaatttgtcagtgatgcctcccaatgcggaaacaactacaattaccggctcatttgccgactctacaattctctttacgcttaaaatgctgttcacggaacctacggatgttccgccgaatttcattactttcatgaagatacttatttaaatgcaatgtcctgcagtttgctttttacagaacgattggttgtttacgaataaaattgaatttgaattttgcctgcttatacaagcgtgaatcacgtagatacacaaaaactatccattaacccctaagggtcatggtacacatggatgtgactgtatgtggatagtacttcatcatagtccttgtttctactcttgtttttgataagtgtcgcaaaagtaataataaaaacgttcaatctatcacttttttcggtttttttctgataaaaagaatctttcgcctgcgctttatccggtcattcgccttcacttttatgacattttgttacttatttatcaaatctattattatatttgcgaaaacaatcgcacaaaatcagcttatgaacccattaaatacttccgtattgttaatatacaccggtggaacaattggtatgattgagaatgccgcgacaggtgctctggagaactttaacttcgagcaactgcaaaagtatatccccgaactgcaaaagttcaattttccaattgacacctatcagtttgatcctccgatggattcgtcggacatggaaccggatatgtggcggaagctggtacgcattattcatgacaactacaatcgttaccacggcttcgtcatcctgcacggaacggacacgatggcttataccgcttccgcactaagttttatgctggaaggactggacaaacctgttatcctcacaggctcacagcttcccatcggcgtactccgcacggacggaaaggaaaatctgatgaccagtatcgagattgccattgcacaaaacaaggaaggaagggcactggtgcccgaagtatgcatcttctttgaaaatcacctgatgcggggaaaccgtacgacaaagatgaatgcagaaaacttcaatgcattccgttctttcaattatccggtattggcggaagcgggaatccatattaaatataataatgtacaaattcacggaaatggtgaagaacgggaattgaaaccgcactatttgctggataccaatgtagtggtactgaagctctttccgggcatccaggaaaatgtaattgccaccattctggggattgaaggtttaaaggcggttgtgctcgaaacatacggttcggggaatgctccccgaaaggaatggtttatacgccggctctgtcaggccagtgaacgtggaattgtgattgtcaacgtaacacaatgcagcgcaggaatggtagaaatggaacgttacgaaacaggataccagttattgcaggcaggcgttgtctccggatatgacagtacaacggaatcggcagtcactaaattaatgttcttactgggacatggatataccccggatgaggtacgcgaccggatgaaccgttcgatagcgggagagataactctgtaggcttcatctatttctattaggcagggataacttatttctaataaattatccctatttttgtaccctacaagaagaaaggaatttcgatggcaaaagagaaaaccgtatatgtatgcagtaattgcggacaggattcaccgaaatgggtgggtaaatgtccgtcgtgtggagaatggaatacgtatgttgaagaaatcgtacggaaagaacccactaaccgccgtccggtgtcgggcattgaaacacagaagcccaagccactggcacttagcgatatagaggcagacgacgagccacgcatcaatatgcacgatgatgaactgaatcgtgtattgggaggcggacttgtacagggttctcttgtcctgataggcggcgagccgggaatcggtaaatcgacgctcgtcatgcagaccgtactgcacatgccggaaaagaagattctttatgtatccggtgaagagagtgcacgacagctgaaacttcgtgccgaccgtctctctgacacttccagcgattgcctgatcgtttgcgagacttcactcgaacagatttatgtgcatatcaagaatacgaatcccgatttagtgattatcgactctatacagactatttccaccgaaagtatcgaatcgtctcccggaagtatagcgcaagtcagagagtgttcggcgtctattcttcgttttgcgaaagaaacacatacgcctgtattgctgatcggacatattaataaggaaggaagtattgcaggacctaaagtgctggaacatatcgtagatactgttcttcaatttgagggcgaccaacattatatgtatcgtattctacgcagtatcaagaatcgtttcggtagtacggcagaattaggtatttatgaaatgcgtcaggatgggttgcgccaagtgagtaatccttccgaacttttgctaagtcaggatcatgaagggatgagcggggtagccattgcctccgccattgaggggattcgcccgtttttgattgagacacaggctttggtaagctctgcagtctacggaaatccgcaacgttcggcaaccggtttcgatttgagaagaatgaatatgctgctggctgttctcgaaaagcgggtgggatttaagttggcacagaaagatgtgttcctgaatattgccggaggattgaaagtgaatgatccggctatcgatctgccggttatcagtgcaatcctttcttccaatatggatgcagccattgagccggaagtttgcatggcgggagaaatcggattgtcgggagagatacgtcctgtgaatcgaattgaacagcgtatcggtgaagctgaaaagttaggtttcaaacgtttcttgctacctaaatataacttgcaagggatcgatacccaaaaactgaagatagaattagtaccggtgagaaaagtagaagaggcgttcagggctttattcggataagacactgatgcataaatagcccgtttttctaattggataatcgaaaacaatatcaataataactaaatgacacaagaataccaactccgtatacttcccgaaatcgcagcaaacgaacagaaattaaaggaatatctttctaaagaaaaaagtctgaatttacgtgacatcaccgctacccgaatcttgaaacggagtattgatgcacgccagcggactatcttcgtcaatctgaaggtaagggcatacatcaaggaaatgccgcaagaagatgagtacgaacgtactatatataataatgtagaaggaaaaccgcaagtgattgtcgttggcgcaggtcccggcggattattcgctgcattacgccttgttgaacttggattacgccctatcgtcatcgaacgtggaaaagacgtgcgcgaacgtaaaaaagacctggcacaaatcagcagggaacacactgttgatccagaatcgaattacagtttcggagaaggaggtgcaggagcttactcggatgggaaactctatacccggagcaagaagagaggaaatgtagataagattctgaacgtattttgccagcatggagcttcaacttcgatattggtggatgcgcatccgcatatcggaacagacaaattgccacgtgtcattgaaaatatgcggaacaccattatcgaatgtggcggagaagtacatttccagacacgaatggatgcattgattattgagaacgatgaagtcaaaggtatcgaaacaaatacaagaaagacttttctcggacccgtgatactggcaaccggacattcggcgagagatgtatatcgttggctggctgcgaatcatgtggcgattgaagcgaaaggcattgcagtcggtgtccgtttggagcatccggcaatgttgatcgatcaaatacaataccataataagaatggacggggcaaatacctgcccgctgctgaatacagctttgtaacacaggcagaaggcagaggagtatatagtttctgtatgtgtcccggaggtttcatcgttcctgccgccagcggaccggaacaagtggtagtaaacggcatgtctcctgccaaccgtgggtcacggtggagtaattcgggaatggtagtggaaattcaaccggaagatttgggaaatgaagaattaaaaatgaggaataaagaattggctgcgcaacaagatgaacagctgatggcactaaacccgaatttgaaaagttcacaactttcagagattaattcacagttactatctgttcttcactttcaagaggaattggaacgtcaatgctggttgcagggaggcagacgacagactgctccggcacaacgcatgctggattttacccgcaagaaattgagttacgatctgcccgagtcatcctatagtccgggattgatttcgtctccacttcatttctggatgccatcatttattagcaaaaggctatctcttggtttccaacaattcggacgaagcagtcacggattcctgacaaatgaggcagtaatgattggtgtggaaacacgaacttcttcccccattcgtatcatacgcgataaggatactctacaacatgtcaccgttcgcggattatttccttgcggagaaggcgcaggctatgccggaggaattgtgtctgccggggtggacggcgaacgatgtgcagaagcagcagccaactatttcaatcattaattaaacttacactaaaatgaattatcaacccgaaatagcaatcgtagaagccaatacattgacctgtctcggtctgaaaggaatcctggaggaaatgattcctatggcaaccatacggacttttcatcacttcagcgaactgatggacgatactcccgatatgtatgcccactatttcatttccgcacagatttacgtggagcacaatgctttctttctcccccggaaacgaaaaacgattgtattggcaagcgacagtccgcaattccaactgtccggcgtacctgtactcaacattcacgaatccgaagaagagctggtgaaaaacatattgaaacttcaccaacatgctcaccatgacggttatccggtaaaagatatgccacccatgcctccgatgcagcctcatcaggaaattctatccgcccgtgaaatagaagtgctcgtactgataaccaaaggattaatcaacaaagaaatagcagataaactgaatatcagcctgactaccgttatcactcaccgaaaaaatatcacggagaaattaggcattaagtccgtctccgggctgactatttatgctgtaatgaacggatatatcgaagctgaccgaatctgacctcttaaaaaataagtcataatcctaataaatgaggattgaccgtcatctatatttgccgttactttgcaccagataaattaacagcagatgaagacaaagaatattatgattgccctcacgctcctgacgacaggtacagcatgggcggaagatttcccgaaagactcactaaaaatagtagacatcgaagaagtggtagtgattgccactccgaaagagaatcgtaagttgcgtgaattaccggtggcagccactgttttatcgcaagataatatgcgcgccaatcaggtgaactctgtgaaaaacctgacaggcatcgtccctaatctgtttatccccgattatggttccaaactgaccacttccatttatatccgcggaatcggctcacgtatcaacactccgtccgtaggactttacgtagacaacatcccttatatcgacaaatccgctttcgacttcaactatgctgatatcgaacgtattgacattctccgaggaccacaaggtactctctacggacgtaatacgatgggaggacttatcaaagtgcacacaaaatcgcctttcacttatcaaggtactgatatccgcatgggagcagcgacctacaataattataatgtgtcactcacccactatcaccggacatccgaccgcttcgctttttctaccggaggtttctacgaacacacaggtggcttctttgaaaattcggcaagaaataacgaaaaggtcgacaaaagcaacgccggaggcggacgttttcgtggaatttacctgccgacatctaatctaaaaatagatatggcacttagctatgaatatagcgatcaaggtgggtatccgtattattataccggtattactcccagtgccatagccaaagctcaaaaagacggtaaagaaattacagaagaccgggcagattatatcggaaagatttcatataacgaccgcagtagttaccgccgtggattgctcaactccggtgttaacatcgaatatcaagctaacaactttatattaagtgccgtgacaggttatcagaacctgaatgaccgtatgttcctcgatcaggatttcacagaaagagatattttcaatattgagcaaaagcaacgtgcaaacaccatttccgaagagattgtgttgaaagccaaacccggaaaaagatggcaatgggctacgggagctttcggattctatcaatggctgcatactacaggtcctgttttgtttaaagaagaaggagtgaagtcggtcattgaaaacaacgccaatgctgcttttgaagaagcatctgccaaacccggagctcccaccatgggaatgactgtacacaacccgactttaagcgtaggaggaactttcgataccccgactcttagcggtgcactttatcatcagtctactttcaacaacttgttcatagaagggctgtccgttacagccggcctccggctcgattacgagaaaatcagtatgaagtataattctcttagcactcctatcgattttggtttcgattttcacttagctatgggccccaaccaaatcaacctgtccgatcagaatatgaaagctccggcctcttttgtaggcaaactctcgactgattatgtacagcttctacccaaatttgctattcaatatgaatggaagaatcaaaataacgtttatgccaccgttacccggggatatcgttcgggaggatataacatccaaatgttctctgacttatcacaaacagaattgaaaaattcgatgatgaatgccatcaaagaaagtccgacaatagggcaagatgccacatggggggcaaccattataaaaatgatggaccaaatggtaccagcaaaagagattgacgtaaaaacttctactacttacaagcccgaatattcgtggaactacgaagtaggtagccaccttactttatgggaaggcagactttgggccgacgtcgcagcattctacatggatacccgcgaccaacaactctcccaatttgcagaaagtggtttggggcgtatcacgattaatgcaggaaaaagtcgcagctatggtgcagaagcagctcttcgtgccagtgtgactaaagaacttagcctgaatgccagttatggatatacgtatgccacctttactgattatgtaatcaccgaagagaaaaaagatggcactcccataattacggattacaatggcaaatatgttccctttgttcccaagcatacattaaatatcggtggagaatatgccatcacctgcagcccacgttctatcttcgaccgggttgtattccaagcgaactataacgctgccggacgtatctactggactgaacaaaacgacgtcagccaatccttctacggcacactcaactggagaacgaatctggaaatcggtgatgcaatgattagtttctgggcacgcaacttcctgaataaagactatgccgccttctatttcgaaacaatgaacaaaggtttcatgcagaaaggacgcccaatgcaatttggggtagatcttcgctgccgcttctaatcatttttactcataaggatattatttagtctttttattgtcagctaaagatttcatccatatagaataatgattttcaacgtattaacagctgacaataagtgctgacaataacccaaaacaggctgacaataaaagattcggacttttattgtcagcctgtctctttgtagattaacagcatagaatacgggatagaagaacgtatgtccctatgaagtttgcattataaagccgttatacttgatttacccaatcggtattgttctgtcagagctacgcagggaaaacgcattatactctttccttaatcttttatacatttatcttacaccaatattgtcttttcatcttattaataagatatttatctttcatttacaatattatttgagtacatttacgtgattataaatcacaattaaaatgaagcaagaaactaaaagaaagattgagatcagcaacctacatgaatttgctgattcattaatattgatagataaccggatagaccgttgtaaaaaacatcaggccagtaccattgttcttattgcaatttctgctgttatatgtggcgctgatacttggaattcaatagaagactttggtaaaagtaaagaatctttttttgcagccaagctttccaattttaatggtatcccttcccatgatacatttaatcgctttttctcggcattagatcctttaaaatttgaagaatcttataggcaatgggtccaaagcattctcaaatgttattcggggcatatagccattgatggtaaaaccatacgaggagcctatgaatccgaacaggacaagcgtcatcgtaaacaaggagtgcttcctgattcgaatacgggaaagtacaaattgcatgtcatcagtgcatttgcaacagaactgggaatctcccttggacagttatgtacacaagaaaaggaaaatgagatagttgtcattcctgaattattagatatgttgtgtataaaagattgtattattacaattgacgctttaggatgccagcgtacaattgcagagaaagtcataaagggagaaggtgactacatttttatagtgaaagataatcaaccgaaattaaaggaaatagtactgtcagtaacagaaagtattgtatcaaaaggtacaacagtacgatttgacaaatatgagacgcatgaagaaggacatggcaggaatgagtcgagaatctgctattgctgcaacgatcctggttttctgggagcagatattagaaagaagtggaaaaatatacagtctttcggatatatagagaataccagaaatacaaacaaaggcactacagtggaaaaaagatgttttatatcttccttggaacctgatgcgcagaagatacttaaaaatagtagagaacactgggaaattgagaataatctacattggcagctagatgtcaatttccatgaagataataccagaagaagaaatatatcagcattaaacttctccgtactggcgaaaattgcattggctacattaagaaacaacaaaagagagataccaatcaatagaaaaagattaatagcagggtgggataatgaattcttatgggaacttattttacatgatttataatgcgttttccctgcggtggcttaatacaattataccggcaccttaccggaactttatcaatgcttcggcattagtttacctactgcttgctatcagtttgcttatacctaagactgcttcgttcataatccaacgtgcctgacctatacttcagtacgatcagattcctccactccaccatgcaaacgcttcatctgataagcaatacgctccgtcccattctttacataaatgatgccgcaacgttgaaagccatacttcgtcagtatatgttgcatgaccttattatcccggtgagtatctacccggacattaggccaacgttcgaaacaccagtccagacaagcttccgacacccctttctgctttccgttcgttgccaaccggtgaatcactccataaggttcgtcattgagccatgcaccttcataaatttgttggtaagtaggatcttctcccaagatgaaacaaaaagttcccaagatttctccttgttcaccggtacagacaaagctatgaccgtcttcaatctcctggcagatcaatgcttccgacggataaccgtcaatccactgggtagtattcccggttgcacgcataaaggcacgggcatagtcataaatctccatcactaaagggagatcttttatttcggtaggtctgatttccatcatttgaaaagttattcagaaataaaacagataataaaatcactcgttaatcgctccacaatgggggcatatacctttctcttttagtttctccccgcaatgtccgcaacgatacttatacccaatgtttcgatagaccttcttcgcaaaaaccaaaataaaaaaggccaggaatagataaccgatatagatatgtgtcatcaggataaagaagaaataacagaaaatacagcaggacatcagtcccagcagataaaagatagccgcagcgggagtcaattgtcggaacaaatcatccaacaccgccaaagctactatcagaaacaaccaaatactcaacagaaaaacagagagaatgaaaggaactttgaacggtgacaaagttggattgaaataaaaatgttcccacgtttccggtacaaagacctgcattgattcgtaaatcgttgcactgaaagccatcaataaacaaagaaacaggggataaacactgtcaatatcattaaaataaaccatctgcaactgcttccgacggaaagcacgaaacaaataagctccaacaaataaagcaaaaataaccacaaaataagaggcatgtgtatcgctgaaaagatgaatagcctgcgaaatactatcagtcggtacaaatgacttcttgagttctttctcacgtatccaaccctgttcatcttgtgtatgtgccagtttcacccaaatgctgtctacactatcggcaggatgaaccgcaaactctgcaaccactaccctatcccccctattcaactgaataaaagtatcttttattgggaggcattccaaagagatggaatcatcgactacttccaagtttgtattccatgtataatggcgttcatacaggtaagtcagcgaatcttttgttttcttcgacagctcctccgaatccagggcaggcgttttataataacaagacgaaagcaaaaacagacacaatagcaagcccatgacagacttcaccatagagaatgcagagaacacaaagttactataagacacggacgacatagaagacacagagaacatgaagaagaattttccatctctcttccacaaaccgttcaaacgagcggttccggaaggatgagttgaaacattgtctcctctacgtcctctgtgacgaatgattccgtgattaattatcctcattgtgccgcctttactttcatttgacaattcttacaatcaaattccagacgaaaacgtttgccgtcattcgacaccaaataatagggttctttataaggcgaacggacccgttgatggataggacaccagcccatactgtagcgcaaacaatgtttgcagaacatcagtaccgcatcttccactgcttctttttcgtatgctgccgctacctgttgtaccccatgctcctgatagaaagaagctgcacgggtgttcattacattccccagatatgttaatgtagtttgcggaaaagcatgactcgttggcttccatactgccaattcctgacgataattgattcgacgggcagttatcaattgatcgattgcctgtctgcggaaatcggctaacaccgaagctggcaaaaaccaatttccggtaaaggatatttctatttcttttgcttcaaaaggtgtattccccagtttggacagttgcgttttcagattgtccgtctgtggagtgcgggcaagttctttctcacgagggagagtgattgtgacgctattatcatcttcatcagtcaatgtcagggagaaaccaaaattattgtcggcaagcaagattttcactgcgatctttctttcggcagatttgcgggaaaggattcgctcaaattcctggtcgaaattacgatacagtgtagtgcggggtttgatacggggcatttcctgcggatagagtttgtcgctgtccacccggttgatacggaaaccctgcaaatgtccctgttcgtcgatatagcaaacaccgtctccattgttaaaggatttaagtccggcaactgtcagatagttgccccgggcctccttcatggttcccatctcttcgcccagcgatttaggagtgtcgaaagagaatatctctttatcacgtccattcaggaaataatgcgtgaatccacgactgaaactcttatcgagttgtggtttaaattcgaaactacacgtacccgaagaagcacgtacatattccggacgacgggcaaagatcgcatccagtttctggcgataagcggctgtcacattcttcacataagatacgtctttcagtcgtccctctattttaaatgaagaagctccggcatccagtagttgctccagttcgtcactttgattcatatctttcagggaaagcagatgtttgtctttgacaatcactttcccgtccgcatctaccagactaaaaggcagacggcagaattgtgcacactctccacgattggcactacgaccgaaacaggcttgactaacatagcattgcccgctatagctgacacaaagagcaccatgtacaaatacttccaaagatacttccggacagctttcatgaatcttctttatttcacgcaacgataactcccgcgccaacaccacttgacggaaacctgcttcccaaaggaatttcactttttccggcgtacgattatccatctgcgtactggcatgaagtggtatcagaggaagattcagtttcgtgattcccatatcctgtacaatcagtgcatcgacaccgatccgataaagtgcatgaatcatctcctccgtctctttcaactcctcttctttcagaatcgtattgaccgtgacataaatacgtgcattatacaaatgagcatgctgcaccaatgcttcaatatcttccaatgagttcacagctgccgcacgggcaccgaatttcggagcaccgatatatacagcatctgcaccatggttgatagcttcaataccacattccaggtttttcgccggagcgagaagttctattttacgctgctttatcatttaatatcattgatgttgtaaggtgtttcctgataaacaaagtagttcaaccagttggagaacaacaaattggcatgagcacgccaacgtaccaacgggcctttttcaggatcatcgtctatataataattgcggggaatctctattggcaggcctttatccaagtcacggcggtattccgtatccagtgtcagcggagaatattcagagtgccccgtgacaaagaactcacgtccgccccgtgccatcgccatatagacaccggcctctttcgattcggaaagcaacgtcagttccggaactttcagaatatcttccctgcgcacttccgtatgacggctatgcggcacatagaaacaatcgtcaaaaccacggaagatggaatggaaaggttccagtacacgatgctcaaagatgccgaacatcttctcttccaacggatattttggaactccataatgatgatataacccggcctgcgctgcccaacatatatataaggtagaagtgacatgcgtacgtgcccaatcaaagatttccgtaatctcatcccaataggtcacttcttcgaagtccatctgttctacaggagctccggtgataatcataccatcatacttctcgtgacgcatctggtcgaaatccgtatagaacgttttcatgtgttctatcggcgtattcttcgacgtgtgactcttgatcttcataaacgaaatctccacctgaagaggtgtattcgaaagtaagcgcaccaagtctgtttccgttgtaatcttcaacggcatcaggttcagaatcacaatccgtagcggacgaatatcttgctgcgtagcgcgggaagtgtcgatcacaaaaatattttcttccttcaaaagctctatcgcaggtagtttatcgggtaaatttaaaggcataatcgctatatattagtaatttgagtgcaaaaatacgaaaaatatagcagattatagggaggttgcttatttagaagacgtacaaattaagtcaatttaatcatcgaagcataacaactaatcaataaaagccttatttttgccgaagaaattagtactaataatttaaatcttagaaaaatggcttacgtaattagtgacgattgtattgcttgcggaacttgcattgacgagtgtccggtagaagctatctctgaaggtgatatctattctatcaacccagatgtatgtactgactgtggtacttgcgcagacgtttgtccgtctgaagcaattcacccggctgaataatacaagctacaaaaaatgtacaggctgctttctacggaaggcagccttttttatttcttgtcttcaccacagattacacagatggacacaggttatttatattcaactaaataaaaattccctcactacaacatattgcagcaagggaattacaatttaaacatatattgaacaataaaaaaaatcttttaatctgtgttcatccgtgtaatctgtggtgaactcttatttcaatttagctaatgcttccttgatacgacggatagcctctacgatattttcatcgcttgtagcataactcatgcggatacattcaggagcaccaaaagaggtaccacctacacaagccacgtgagcttcttcaagtaagtacattgccaaatcatccgaatctgcaatcttacgttcgccgttgctctttccaaagaaagtatcgcatttcgggaacaagtagaaagcaccttgcggaacgtttacttcaaatcccggaacttctttagccaacttcacaatcaggtcacgacgacgttcgaatgctttctgcatctcttttaccggttcttgtgttcctgtatatgcagcttcagcagctttttgagaaacagagcaaggacctgaagtgtactgaccttgcaacttgttgcaagcttttacaatccattccggaccggcaataaaaccgattctccatcctgtcatagcatacgctttggatacaccgtttacaatcactgtacgttccttcatttcagggaattgagcgatactttgatgtgcgccgatataattgatatgttcgtaaatctcgtcagcgattacgattacctgcggatgtttagccaatacagcagacagtccggccaattcttcttttgtatatacagaacctgtcgggttggacggggaacaaagaatcaacgctttcgttttcggagtaatagcagcttccagctgttccggagtaatcttgaaatcttgttcgatacctgccgaaacgataacaggagtaccttctgccattttcaccatttccgggtagcttacccagtaaggagccggaacgattacttcgtcacccggatttaccaatacaagaatcgtattacaaacagattgttttgcaccatttgcacacgaaatctgggcggctgtatattcaagaccgttttcttttttcagtttctcaacaatagcattgcgcaaagccggatagcccggtaccggagagtagcgggaaaagttatcatctacggcttttttcgcagcttctttgatgtggtcaggagtattaaaatcaggctctcctacacttaagttaataacatcaacgccttgtgccttgagctcgttgctcttttgagacatggcaagcgtcgccgacggcgacaagctgttcaaacgatctgataattgattcattttgtatctattttattgttgttgagtgaaaatcgctgcaaaataagcgataatatttgatatatgaaaacaaaaaggcaatttacttattaaaatgtaaagtatgccccattctttctttctttgttctcaagtatcgctcattatacggattaggaactgtttcaacaggcacgttttctacaatttccaatccataggcttccaaaccaacacgttttaccggattatttgtcaaaagtctcattttgtgtactcccagctcacgaaggatctgtgcacctactccataatcacgttcgtcagcaagatgtcctaagcaaatattcgcatcaacggtatccataccgtcttcctggagcttgtatgctttcattttttccatcagaccgatgccgcgtccttcctgattgagataaaccactacaccttttccttctttttcgatcatttccatcgctttatgcaactgttcgccacagtcacaacgctgcgaaccaaggatatctcctgtagcacaagaggaatgaacacgtaccaggataggttcgtcttcactccacgcacctttaaatatagccatgtgctccaatccgtttgatttctggcggaaaggaatcagacggaacatcccgtgttcagtaggcatgtttacttccactcctttttccacaatggattcctgtttcaaacgatagacaatcaggtcatggatagagatcagtttcagtccatgttcatctgccatctggcggagttcgggcaaacgtgccattgttccatcttcactcatgatttccatcaaggcacctgcggggtaaagtcctgccagacgagccatgtcaatcgtagcttccgtatgtccggcacgacgaagcactcctttttcttgtgcatataacggattgatgtgcccgggacgcccgaaggttgccggtgtagaagtaggatcggccaacgcctgaatagtagcggcacggtcggaagcagaaacacctgttgtacagccttccagtttgtcaatggtaaccgtaaaaggagttcccaacacggaagtattgtcacttacctgatgcggcaaatccaactccttgcaacgagacactgtgacaggtgcacaaagtacgccacgtgcatgtttcaacatgaaatttactttctcgggagttatcttttcagcggcaataatcaagtcgccttcattttcgcggtcctcatcatccactactatgacaaacttgccttctttgaagtcggcaatcgcatcttctattctatccattttaatagtctctttcataacacttatttattgattttctgtatgatgaattgaatttgttcattgttctttataatccgttccatatccttagccagacgaacgcggaacgcccagatgcggaaatagaaaaataaaccgataggaaaaatgactccggctaccagattcaaccaatatatatggaacgggcgcacatgagcagaaacggaaataaccggataattgtttaatgcaccgatcaaagtggcagatttcgtattggacatttcttcaaccaacgcttccagcttttcattgatagccattacttcgttgtcatcttcgcttgacatccacaatttaaagtaattgggtgctttttccaatcgtttcttggcagcatacgctctgcactctgctgtgagttgttccaaatcaccagtcagacgtggataatcaggatcatggataatcacttctttcttaaatatatggcgtacactacggattcccataatcttcttgaaccagttgatataggcatctgcattaagcacaacagaatccttattcgatttataggtaaggaaaactcctaatggggcaaggaccgcactacttgtccacattcccatccatactatccacttaccgtcacgggccattttatatcctgtattatcaatgatatagtaaataataaataccaacacggatacaattaccggcattcccaaccctcctttgcggatgattccacccaatggagctccgataaagaagaacagcagacaagagagtgaaatcgttatcttcttatgccattccgtcttatgtttgcgaatactataatcgttgttctccatcgtgaatttcttgaacccaagatcgttggccacattctccgcccgactgacagcagaagaaagcaccttctgtttctgcgttaaagaggctacttcgtaaaggctgtccacattatattcatggatatccgccttttctattttgaccgtatcttcttttgtcaatccataagaaggacggaaatttccttctgccacttccctgtaatactgtcgtccgatactatctcccactaccgtcattgagtcgatagagctttgcaactgcgccatatccttagcactggactgcttacccataatctcaccgtcaaccatattgaaatcggaattaaactcaataatggaatgtttttccctgaattcctcgcgtcgataaggtacattctccgatttcatactttgagctttcagattctcaaataaatctccgctatacaaatgcagccaaagatgctgtttatccgcggtcatctccaaacgcccggaatcagcatatataatacgtgctttctcaaagccatctttcatactataaatcagcacatcatatagcataccggtcttccggttcttcttagctacctttaaattatagtccttgatttcagaatagaaaactccttccggaatgtccaactccggagatttctgtttcatcgaaagaatcagggttcccaatttagcctgggcaataggacctactacattttggaaatagaatgagacaccgacaagcccgcaaacgaagaaagcaagcggacgcatgattttaaggagagaaatacctgcggctttcatcgcgagcaattcataacgctcaccaaagttaccgaaagtaatcaaagaagccagtagcacagccaatggcaatgatactggcactaatgttaatgcggaataaaagaagaattgagccataacgctcatctccaacccttttccgaccaattcgtctacatatctccacaggaactgcatcatgaatatgaacagacagatgaagaatgtaccaataaagagcatcaaaaaactctttacgatgaatatatctaatttctttatgcgtagcatcttaataggttcgtgcaattaggatgcaaaattagcacaaaaaaaggagcatcgaaaatttttagttgaaagttaactaaaaaccacaagttcttcttaatttagctacttgtgactcccacaattctttcatatcatctacttcatccggctctgcgaaatcggtaatttccagcacataatcactagtcagctcattataagtcatcttgatttcaaaataatcgcgctcgttttcatcatccagccaacggaagcggataaaagagaaagagcgaatggcaataatttctgctttcctctgttctgtcttgccccaatgaaactctactattttatcgtcagaaataactttgtctgcaaaccagtcctccaacccggtcggtgtgctaatagccccccaaagtatatttttagatgttgcattcaacaaatactccaaatgaatcttttcctttttcatagcaatttcgaattgtttttacgtgtgccaagataaatacttttttctaaatacaccgcataaatcagacactttatttaattagtctttcatcatcgagcctcaaactccctgtttatagggaaaatcaagacccgtattaagaaaaaacacaaaaaagttatgaattgttttggagattataaaaaatcatctatctttgcacccgcaatcgagaaacgatggcgggatagctcagctggttagagcgcatgattcataatcatgaggtccccggttcaatcccgggtcccgctacttgataagaataaggcatttgggaggcttccacttctgggtgcctttttctttttatctcttcgcgaaatcattgtgaaatcttcaattacatttctaccagaagccaacgttgaacaataaaaatagcctcaacttacaaaaaattgaggctatcgaaatatcatttaaaaagtttttctattcccattctatagtcgcattaggtttcggcgacatatcataacaaacgcgatttacattcttcacttctttcagaatacggtctgttatcttcatcaggataggccaatcaatcggctcaatagtagccgtcatagcatccaccgtattgacagcgcgaataataaccggccaatcaaaagaacgagcattatcacgtacacccacggatttaaaatcaggcactactgtaaagtattgccatacttttttatccagtccggcaagttggaactcctcacgcagaatggcatcggattcacgcactgcctccaaacgatcacgtgtaatagcacctaaacaacgtacacccaaaccaggtccagggaacggttgacggtaaaccatttcataaggtaaacctaactccaagccacaagcacgaacttcatctttaaataattggcgtaatggttctacaagttggaattttaaatcttcgggcaaaccacctacattatggtgagatttcaccattttagcagttttcgttccactttccacaatatccggataaatagtaccttgacctaagaaatcaataccgttcagcttacgcgcttcttcttcgaacacacgaataaactcgccaccaataattttacgtttctgctccggatcttctacaccagccaacttattcagaaaacgatcggttacatctacatacacaagatttgccttcaactggttgctgaatacctcaaccacatcttcagactctcccttacgcatcaaaccatgattaacatgtacgcataccagattgttaccaatagctttcagaagtaaagcagctaccacagagctatcaactccacccgacagggccaacaatactttcttatcgcccacctgacgcttaatcaattctatctggtcattgacaaagttcttcatgttccagttagcttcagctttacaagtatcgaaaacaaaagactttactgcagcctttatagcctcgatatcatctgtaaattctgccaacttcacttcacaagttgctttatcatgccctgcagccatgacaggaattcccaaagtatagatagccggatttatatcaatagcaacgccatcgattacattattcgggccaccattgataataataccctttacattgggcaatgctttcagttcttctactgtgatatcgtgaggataaatctcactataaactcctaatgcacggatggcgcgagccaataccgtattctcatgactacccaagtcaaggataacaatcatatcctgcttcatctgattttggttgtttttaagttattgtattgttattattcactatcatttttcaaacggtctgcaaatataaagatttttagagagactataatgcattgattctctaaagtttcagaacagagtaacgtttttcttacaactatagtattccaaaaagaactgaaacaacatagtacgcggccggatagcaataacctgattcttccatacaaccttttaaaatctacgctttcaaccgcatcacaaaccggctacccttacccaattcactctctactgtcaacgtaccaccatgagcttccacaaaatccttggaaatagataatcccagaccactaccttgtactttcgtacccggaacacggaagtaacgatcgaatatactttgatgataacgcggatcaatgccttttccaaaatcctgcacatacaattcgattatatttccgtcttgtctggcaccgataatcacacgaccgttctcttttgaataacgtatggcgttactcaataagtttgtcaatacccatgctattttttcactgtcaacaaacagtttgccgattttttcttccggatattccacttcaatttgaatattgaatttgtcagcttgcacctgattagccttaattgcatattcaatcaattcaatcggtttcgtaatctttggcatcaattggagcttaccggcttctacctgagtcatattcagcagttcccccgtaatgctaagcagacgctcactattctctttaatacttctggacagttgctcctgctcatcattcaaggctcctacccgtttatcttccaataggttaagactcatcatgatagcagcgatcggagttttcagttcatgtgaaatcgtagagataaaagtagtttttgccgaatcaagctctttaaactcggttatattcttcaataaaatcacatctcctaacttttttgattcatccttcttcgcatctgtattgttaatcggaatgtaggaagccttgaaataactttccttattatctgcataaatctttaaaggctctttctgatcacttggcgtcaccaactcacgaattagccggcggagcaagtcattcttcaaagaaagttcctctgccgatttacgaatcacattttcccgtttcatattcaggatacttaatgcttcatcattgataaacaaaatctcacgttccgtattcagaccgataatcggatcgtcaatactattaacaatagcctctataaactttttagctgaaagaatatccgacaaagtacttgcacgatattcggtcaaacgttccgccatccggttaaaactgccagccacttcacggaactcttcattgtcactcatgtcgagacgtttctcataattatgattggctatttcaagaataccatctttcaattccttcacaggtttgctaatactacgtggtagccagtacaacaaacccaatccagtaaatatacaaatacccccagtgatagaaatccacaataaagctcgctctaacccaggcatagcagcaggactatcaggttccgttgctgtcaaaatctgaaggttaactacagaaagtgttaccagcaaaattatcattcctgccagcatcccaatgcctagcaccagtttcgttttaatattcataactttcatacggattaatattatgcaagtataatcaaatctatattagcttgcgacaaattatttaaaaatcttctatatttcaatacggaacagatggctcccggtaatctcaagtcaggtgatcccatacaaactgttgaaatctgcttgtctttacatgcctttacaatactctccaagatatctctagactgtacctgtaacacttctccccccaattccgttaccaatttaaaatggttcaacagataacgctgcctagccaaatcaatcctatccatactctctttcggagtttgcacatacaaagcaatgaaagtcgtattatatcgcgttgccaatcgcgctgcctttcggataattcgtcgcggtgttttctcatgactactgatacatgccaaaaatttttcatgcctcaacccgacagctactcccatcaccacttcattctccaccttcttctctaccctaagagctacttccttcagagccaactcacgcaattgtaatatattctctgcacggaaaaaattatcgagcgcagtctgaatcttttccggacgataaatctttcccgcttttaaccgagtgattagttcttctgctgtcaagtcaatattcaccacctcatccgcttcctgaatcacactatcggggacccgttcttttacttcaatacccgtaatctcctgtacttcttcattcacactttcaatgtgctgaatattaattgccgaaatcacattgattccttcatccagcaatgtcattacatcttgccaacgtttctcattcagactcccttccacattggtgtgtgctagttcatccactatcacaatttcgggatgaagacggataatggcatccaaatccatttcttccaactcctttcccttgtagaagatcttacgtcgcggaatgacaggaagtccttgtagcatcgcttccgtcccggcgcgtccatgagtctcgatatagccgattttcacgtccacaccattttccagcagttcatgcgcctcctgaagcatacgatatgattttcccactccggctatcataccaatgtaaactttaaatttaccccgctgggatctctttatcagatccagaaaatgctgtacactttgttctctatcatccatattttatctgttattttaaacattccaacccgtagtaatcatcacgatcaccacgggtttcacaaaaattcatgagtttattttatggccttaaagttacgccaaatactaaatgggtgtcctccaaacgtggattccatatagcctgtacaaatataggcaatgaaaacttatcattaaaatttattgctttcgttgctttcaaagcgaggttagtcacggcaaaaccattcacatagtactgtggtgtctcataaggaaccataccacacgtagcattcagatcaacccctttcacgctgaacggatagttcagttctacataggaagaatatgcctgcttatcttcacctttatcattaatctttctgtcagctccggcaaacatagtataccatgcaatagacaatggaaacttctcaatgggaagtgtataagctaaccctgcttcaaaatgatgtccggtttctccgctcttaaaatggaaatagttgtttgtatattctccattagcaacatcagcctgtccatcccaccaaagagtggctacagaaagtgtcggtcctgcttcaccgaacttataagctgcagtcaggtcaatttctttattgctctcactcaaactggttgatccccatgcagtaagcgagaaattacctacgctaaatcccaaagtcggctgaaaagaagcggctcccccctgataaataccacgccatacatacgaacttaccaaatcaccttgtatagtaaactcttgtgcttgtgcattagttgttcctaacatacaaacggctgctacagccattgtgcctaaaaaactctttttactaaaaaaacttttcatacttcttatcttattttctattttatgtttccgtaaaaaagcagcgccccatccaaccctgttaatttgaaccgtggtataccccaaacggcccggacaggaacgctgctcaatcttcatctacttattgctttcctctaaagcgatattcaatttcaagacgtttaccttttcggttcccagaaatcccaaaaatggtttttctatacttttatccacgattgctctaacttgttcttctgttaatccgcgtgcctgtgccactcttttcacttgcacataggcacattgaggagtaatgttaggatcaagtcctgaaccactggccgtaaccatctctgcaggtacatccgcacggctcaaataaggatgatgtacaagaaatgtatcgatacgagttttcacctcatccagatattcctgattcgtagggcctttgttgctaccggaagaactacttgcatcatatccgtctccagcagaagaaggacgtccccagaaataaatatcttttgtaaacatctgccctatattagctgctcccactaccttcccgtccagtgtagctacttcagcatttcccttattaggtcctgcaacctgtgcaaataaccacaggatgaggatatagaatatagagaaaaagacacaaaaagcaagtgttatttttaatgatttcaataaagttttcattgctattgttatttaattaaaagaataaacctactaataaatcaatcaacttaattccgacaaaaggaacaatcacaccacctacaccataaattagcaaattacgacgaagtaaagcacttgcacctatcggtttgtattgcacaccacgtaaagccaacggaatcagaatcggaataataatcgcattaaagattaccgctgaaagaatagcactttcaggactatgcagatgcatgatatttaatgcggccagttcaggaatagcaaccataaacaatgccgggacaatagcgaaatatttcgcaacatcattggcgatagagaaagtagtcagtgtaccacgagtcatcagcaattgtttaccgatctccacaatctcaatcaattttgtcggatcattatccaagtcaaccatattaccggcttcctttgcagcctgtgtaccactattcatagccacacctacattcgcttgcgccagagcaggagcatcatttgtaccatcacccatcatcgcaaccagcttaccagcctgttgctctttcttgatatattccatcttatcctccggtttagcttcagcgatgaaatcatccacaccggctttttctgcaatatatttagcagtcaacgggttatcacctgttaccataaccgtttttacacccattttacgcagacgttcaaaacgctcctgaatacccggtttgataatatcctgcaattcaataactcctacaacattttggtttacacatactactaatggagtaccaccattacttgaaatagtagaaattacctcttccacttctttcggaaatttgtttccggcactttctacaattttacggatagcatcaaaagctcctttacgaatctgtgtaccatcagccaagttaacaccggaacatttagtttcagctgtaaattttatcatatgagcaccagtcgtattcaaactacgcatacgaataccagattcacgtcctaactctacaattgatttaccttccggagtttcatcagacaaagaagacaacaggcaagtttctacaaaatcatgtaaatcaacgcccggagccgtatggaagtgagttgctttacggttaccaatggtaatagtacctgttttatccaacagtaacgtatcaatatcaccagcagtttctactgctttacctgatttagtaattacgttagcacgaagtgcacgatccataccagcaataccaatagccgaaagaagtccgccaatagttgtaggaatcaggcacacaaacaaagaaattaatgaagcaatggtgataaccgtgttgctataatcggcaaatggtttcaaagtcacacacacaatgacgaaaacaagcgtaaaacctgccagcaaaatagtcaatgcaatctcattcggggttttctgacgggaagcaccttccaccaatgcgatcatcttatcaagaaaactttctcccggttgggtagtcaccatcacctttatatgatcagacaacactttcgtaccaccagttaccgaactcttgtcgccacctgcttcacgaatcaccggagcagattcaccggtaatagcactttcatcaatagaagccagaccttcaataatctcaccatcagacggaatcacatctccggcatcacacacaaatacatctccttttttcaactgtgaagaactgatagtaacaattttattaccttctactttctttgccggtgtctcttcacgagtcttacgtaagctatcagcctgtgctttaccacgtgcctccgcaatagcttcagcaaaattggcaaacaacaaggttataaacagaataataaacacggcaatattgtaagcaaacgaaccctgcgaagaatttacaatagagtaaagtgttacgagaaacataaccgctgtcgccacttccaccgtaaacattatcggattcttgatcatcatccgaggattcaatttcacgaatgactgtttcaaactttctattacttgctccttaggaaacaaagaagctgacgtattatttttcatatcttctctaattcagtattacaaactcaaatgttcagcaattgtactcaacgcatgtaccgggaagaatgacagagcggcaacaataaagattacagcaaatgtcatcactccaaaagtgaccgtatctgttttcaatgttccggcactttccggtataaactttttctgtgctaatagtcctgcaatggcaacctgtcccacaatagggataaaacggctaagaatcaaaacaataccacatgtccagttccagaaataagtattatcgcccaaaccttagaaaccggaaccattattggccgcacaagaggtgtactcataaagttgctcgctcaagccatggaatcctaaattattcaaccaaccgccttcactttccacaaaatccggatgatgtgcataaatataacttgagatagccgtaaacaccaaaattacaaacggatgaagcaaagctacaatcgttgcgattttcatttcgcgagcttccactttcttaccgaggaattccggtgtacgtcccaccatcaaaccgctgataaacactgcaatgataatgaatgtatagtagttcatccaccctacacctacaccgccaaaccaagtattaatctgcatattcagcatttccatcataccggacagaggcatagtagaatcatgcataccattcacagagccattggaagttacggtcgttacaatactccacaacgcggttgctccggctcccagacgcacttccttaccttccatcgcaccattatcctgtgcaattcccagctcatcgatgcgcggattaccacccatttcctgattgacattaatacacacaccgaccagaaaagcgaaaagcattaccccataaatactgtaagccaatttcttcctgcgggtatagaatcccaatgcaaataccattgccatcggaataatcagaatagaccagcattctgccatgttagtaagataagtaggattttccaatggatgagaagagtttaccccaaaataaccaccaccattcgtacccaattgtttaatagggacaattgcagctgtaggtccttgagaaaccatttgctcctgaccttccattgtggtcactttcatctttccatcaaatcccattggagttccctgaagaatcaggataaaacctacaatcaaagaaagaggtaataagatacgtgtacaacttattaccagaaattgccagaagttaccaatcgttttagttgtttttgcagcaatactcttcataatacctgccatagcggccatacctgttgcagcggtaataaactgaaaaagcatgatgacgaacagttgagtaaaataggtcagcccgctttcaccactatagtgctgcaagttacagtttaccataaaactaatacaagtattgaatgcctgatccggagtctgcggtccgttgccatccggatttaaaggcaaccatccttgtgaaaccaggagcaccattccccagaaaaaccagaaagcattcaggatcaacaatgctttcaggaattgtttccagttcatttcttcattagggtcaattccgcatactttataaatgactctttcaatgggagccataaaatcagaccaagttttttctcctttgtagaccttggcaatgtattttcccagtggataagacaagatcaccatcaaggcaatctgaacaaccacgcctaaaatttctgtattcatatactttttaccttaaactgtgtgtgttactttaaaacttttcgggtttgacgagcacgtacatcaaataaccgaagatcgcaatacctaatacgaataatgctgtgtacataatcaattctcctttttctttaaatattttcaaaccagtctacacatttccaaaatagccagaaacaagcgaaaccgcttaacaggcagaaaataaatgatagtgttattcccatgtttttaccttttaaatgattactattatttttttactcgccacccttcatgccaaatgcgtgccacaaaaaacacacaacagataacagactaatattcaataaaatacacatcacaagaaactttctatccatccaacatacccttccattttgaaaaaagggttctattttgaaaagctttgtacttttccagaatttcagaagagaaaaaataagcaaattatcactttgaaaggggggggggtcattttgaaaaggcaagagaaggaaacataatacttataatacactgataataagagattaacaactaatataggtctattggtatatgctttgcaaagagatagatatgaaactttatattattgcaaacagattacctgtcaaagtagccggcacaaacggtaaattcgcattttcgcgtagcgaaggcggactggcaacaggtttggattctcttcagacttcttatgagaagcactggataggttggcccggaatatgtgccaatgaagaaaaggaccaacaggagattaacgagaaactacaggaaatgaattttcatccggtcttcttgtcggaaaagcaaattgaaaattactacgaaggatacagtaacagtactatctggcctttatgccattacttttatgcttataccttatataagaactgtttttggcaatcctaccagcaagtcaaccgtcttttctgtgaggagatttgccgactggtacgtcccggcgacaaagtatggatacaggattatcagttgatgctacttccgggaatgttgaggaaaatatatccggaactctgtatcggatatttccatcatatcccgttcccttcctacgaactttttcgtattctgccggagcgcgccgagatactgaaaggcttattaggagccgacttcattgctttccacacccacgactatatgcgtcatttcatcagtgctgtagaacgtgtattacatctcgattttaaattggatgaagtacagatcaacaaccgggtgaccagagtagaggcattaccaatgggaatcaactatgaatcttatcataaggcctcggaaaataaagaagtgcaccaagctattgaacgtacccggaaacttttcggcgagcataaactgatcctgtcagtagacagactggattacagcaaaggcatattgcaccgtcttcgtggctttgccaccttcctcgaacatcatgctgaatatcacggtaaagttacattggcaatggtcattgtcccttcacgcgaccatgtaggcagttatgcggaactaaaaacaaaaattgacgaagaaatcggctctatcaacggacgttactccacaatgaactggactcccgtctgttatttctatcatggcttttcactggaagaactgactgccatgtactatgtggccgacatagccctcgtcactccacttcgggacggaatgaatctggtagccaaagaatacgtagctaccaaatgcgacaatcccggtgtacttatccttagcgaaatggcaggtgccgccgtagaattgacggacgctatccaaatcaacccgaacgatacagaacaaatagaaaatgctatttgccaggcacttgaaatgcccgaagaggaacaaaaacaacgcctgcaacgtatgcaaagcattctgtccgtacagacagtcaacaaatgggcagccgactttgtcaatgaactgaacgcgacatgtatgaaaaatgatatgttacggaaaaaacgcatcgtagctgccaccatcgcacaaatcaagctcaagtataaccaagccaaacaacgcctgattctgctggactatgatggtacactgacggctctcaaaccacgtcccgaggatgcacaacctacaccggaactcatttctattctacaacaactggctagcgatcccgccaatcatattgttatcaatagcgggcgggatcactttacattagaaaaatggcttggctcccttcctgtgtctatggctgccgaacatggggctttctacaaagagaacggggtttggcataaaaacataaagaagaaagaatggggagcaggtattctctctattcttcaaatgtttgtagaccgtactccccgttcccatctggaagtgaaggaaactgccctggcatggcattatcgtgaaagtgacgcatggctcggcacattaagagcccaacaactcgtcaacacactgatttcgctctgtacccggcagaaactacaaattctacaaggaaataaagtgatcgaaatcaaatcaccggattgcaataaaggttccgaggtgggtcgtctgctagccaacagacgttatgattttgttatagcgatgggagacgacactacagatgaagatatgtttcaggcattaccgaagagcgctatcgccattaaaataggtagcgtatccgaagccgccaactatcacctgtctgcccaatctgacgtacttcctttcttacggtctttactaggcaaacaaaaaactgccacaaaaaaaggaagtattaagaatcgcctgactttcgctttcgactttctcaaagatctattaaaaactcaataaaaagcaatcaatatgaataatttaaattatggagtgataggtaactgccgaacggcagctctcatttcgcagaacggaaatatcgaatggctctgttttcccgatttcgattctccttctatttttgccagtatgctcgaccgggagaaaggaggagctttcggattcgaagtttccggagactatcgcatcacacaaaattatgtcccccacaccaatattctttctacccaattctcctccgatgaaggagaattcgtagtgctcgactatatgccctgctatcgttcacaagacgaaacagggcattatttacctgccgaattataccgctacatacattggataaaagggaaaccgcgtttcaagatcaactatcatccggccccgaactatgcgcagggacaagtgatccttaatatcactccacagtatatcgaatcctactgctcctttgacaacaaggacagacaatatttatatgcttccctgtctcttcaggacatcaaagagaaaaaagaaatcattcttgagaaagacgaatttctcctgctctcctataacgagaaagtgatcccaatcgacatagaaagggagaaaatagaatattgccgtacgctggtatattggctgaactggacagacagaagcaagaaatacactctatataatgacgtaatcgaacggagtttattggttctgaaactaatgtcctaccacaacggagctgtgctggcagcactaacgacaagccttccagaagctgtaggagaagtgcgcaactgggattatcgtttctgctggcttcgggatgcttccatgtccatcgaaaccatgtttcaaatcggacataccggtgcagccaaacgctttatgaaatttatccaatccacattcgtttccaaacatgattatcaaattatgtatggcatccggggcgagcaccaactaaccgaagtgatactcgaccatctatccggttataagaactccaaacctgtacgaataggaaatgatgcataccatcagaaacaaaacgactcttttggttacctgatggacctgatttaccaatattatcgcctcatgcccggtacattggacgaaattgaagatatgtgggagatggtaaagagcattttagcaaaagtagtagaaaactggagaaagcccgataagggaatctgggagatccggggagaaggacaacactttgtttcttccaaagtgatgtgttgggtagctttagatcgcggagctaaaatcgctcaaatgcttaacaaatataattatagcgaacgttggcaactggaagccgaaaaaataaagaaagatgtgatgaaatatggctggaataaggaacttcaaagcttcacacagacatataataatcaagcaatggattcctcattactattgatggaaccctatggatttatagaagcagatgatatacgctatcataaaacagtggaagcagtcaagaaagcccttttccataaaggacttatgtatcgctataacagcaaagacgattttgggttgcctacttctgcttttacgatttgtacattctggcttatacgggcattgtttgtaaccggccataaagaagaagcacgctgcctgtttgacgaagttctgaaatattccaatcacctcggattgtttagtgaagatattgatttcgaaaccaaagaacagttgggcaacttcccgcaggcatattcacatctagcattagtaaatacagctattttatttgcagaagaagagaagaggttatcttttatccggccttagagaaggccctaattcagaagtgataaaaaaacagaaagccccttgattcattttgaatcaaggggcttcttaaaaacggcggctacctactctcccactgttacgcagtaccatcggcgtgacgaggcttaacttctctgttcggaatggggaagaggtggaaccctcgtgctataaccacctgaataaggttatgacatgatgaaaagtaaaatttcagtgtctagaaagctaaacgtatatacccaaccggtacatgtccgaaagaaagtgaacgggcaattagtaatgctcggctttgatgttaccacctttacacctgcatcctatcaacgtcatcgtctttgacgaccctaagaaatctaatcttgtggctggcttcgtacttagatgctttcagcacttatccaatcccgacttagatacccagcaatgcacctggcggcacaactggtaaaccagcggtcagtccaacacggtcctctcgtactagtgtcagagccacgcaaatttcatacgcccacgatagatagagaccgaactgtctcacgacgttctgaacccagctcgcgtgccactttaatgggcgaacagcccaacccttgggaccttctccagccccaggatgtgacgagccgacatcgaggtgccaaacccctccgtcgatatgagctcttgggagggatcagcctgttatccccggagtaccttttatcctttgagcgatgtcccttccatacggaaacaccggatcactatgctctagtttcctacctgatcgacttgtctgtctcccagtcaagcgcccttatgccattacactctacggacggttaccaatcgtcctgagggcacctttagaagcctccgttacacttttggaggcgaccaccccagtcaaactacccaccaaacagtgtcctcgcaacaacgagttagaactcaaataatcaaagggccgtatttcaacagcgactccacaaatactggcgtacctgcttcaaagtctccggcctatcctacacatcaattacccaaattcaatgttaagctatagtaaaggttcacggggtcttttcgtcccatcgcgggtaatcggcatcttcaccgatactacaatttcactgagctcacggttgagacagtgtccagatcattacaccattcgtgcaggtcggaacttacccgacaaggaatttcgctaccttaggaccgttatagttacggccgccgtttactggggcttcaattcaatgcttctcttgcgatgacatctcctcttaaccttccagcaccgggcaggtgtcaggctgtatacgtaatctttcaatttggcacagccctgtgtttttgttaaacagttgcctggacctattctctgcgcccaactctcgttgggaccctttatcccgaagttacagggtcaatttgcctagttccttaaccgtgaatcactcaagcgccttagtatattcaacccgactacgtgtgtccgtttgcggtacgggtaccttaaagattaagtttagcggattttcttgggagtatgcttacacgcactattaccttattccgaagaatttggtatactatcaggttcgactcttatcccggatttgcctgggataatcaacatctacacccttcaacggactattccgtcagtccgcggcgctgtcactcctccgtctccacgtcactctttaaggtagtacaggaatattaacctgttctgccatcggcctcaccgttcggctgagccttaggacccgactaaccctgatccgattagcgttgatcaggaaaccttagtctttcggcgagggggtttctcaccccctttatcgttacttatacctacatttgcttttccacacgctccagcaaagctcacgcttcaccttcgacgcagagtggaatgctcccctaccgatcattactgatcccatagcttcggtaaattgcttgatgcccgattattatccacgccaaactcctcgactagtgagctgttacgcactctttaaatgaatggctgcttccaagccaacatcctagctgtcttagcaatctgacttcgttagttcaacttagcaattatttcgggaccttagctgatggtccggattcttctcctttaggacatggaccttagcacccatgccctcactcctgggatcgaactactgcgcattcggagtttatcaagacttgataggcggtgaagccctcgcatcttatcagtcgctctacctcacagtagtaattcccaaggctgcacctaaatgcatttcggggagtacgagctatctccaagtttgattagcctttcacccccaccctcagttcatccggaagcttttcaacgcttatcggttcggtcctccagttagtgttacctaaccttcaacctgaccaagggtagatcacttggtttcgcgtctactccttccgactaatcgccctgttaagactcgctttcgcttcggctgcggatctcaagatccttaaccttgccggaaaaagtaactcgtaggttcattatgcaaaaggcacgccgtcactgtttacacagctccgaccgcttgtaggcgcacggtttcagggactatttcactcttctattcgaagtgcttttcacctttccttcacagtactggttcgctatcggtctctcgggagtatttagccttaccggatggtcccggcagattcacgcaagattcctcgtgtcccgcgctactcaggataccactacgcttcatttagcttcgaataccggactatcaccgtctatggtttcattttccaaagaattcttctcactaaatttcttgcgacatcgtggtcctacaaccccaatattgccgtaacaacattggtttgggctaatccccgttcgctcgccactactaggggaatcattattattttcttttcctacaggtactaagatgtttcagttccctgcgttagcctcttgctatgcaagatgtcattccttcagaatgacgggttgtcccattcggaaatcttcggatcaaaggttatttgcacctgcccgaagcttatcgcagcttatcacgtccttcatcgcctccgagagccaaggcatccgccatgcgcccttgcttactttctttcaaacgttttattctcgtactggtattggtagtggaatgcttccttctatcaatattgcatactcgaacacgtacggtttgatatatacttttagctcttactaaaattttactttttgtacatcatgtcaaagatcgtttctctttttcagagatcgtggagaataacggattcgaaccgttgaccctctgcgtgcaaggcagatgctctagccagctgagctaatcccccaagaggttatcaagaattttgttttttagcttttagctttccctgttcctcattcttgagcttggtagtcccaggcagagttgaactgccgacctctacattatcagtgtagcgctctaaccaactgagctataggactagttcaaccttgtctacctttcgtctagactcggcttctttttctcttgtttatctctatctatacttctatagatggttgatctatatgttataaataaacaagtaccagtagtacaaaaaacagaacctttaaagtcttttagtggctgccacgttttgtgacagttacggcatcgctccagaaaggaggtgttccagccgcaccttccggtacggctaccttgttacgacttagccccaattaccagttttaccctaggacgctccttgcggttacgtacttcaggtacccccggctttcatggcttgacgggcggtgtgtacaaggcccgggaacgtattcaccgcgccatggctgatgcgcgattactagcgaatccagcttcacgaagtcgggttgcagacttcgatccgaactgagagaggtttttgggattagcatcctgtcaccaggtagccgccttctgtaccccccattgtaacacgtgtgtagccccggacgtaagggccgtgctgatttgacgtcatccccaccttcctcacatcttacgacggcagtctctctagagtcctcagcataacctgttagtaactaaagataagggttgcgctcgttatggcacttaagccgacacctcacggcacgagctgacgacaaccatgcagcaccttcacaacagccttacggctatactgtttccaatatattctgttgcaatttaagcccgggtaaggttcctcgcgtatcatcgaattaaaccacatgttcctccgcttgtgcgggcccccgtcaattcctttgagtttcaccgttgccggcgtactccccaggtggaatacttaatgctttcgcttggccgcttactgtatatcgcaaacagcgagtattcatcgtttactgtgtggactaccagggtatctaatcctgtttgatacccacactttcgagcatcagtgtcagtgacagtctagtgagctgccttcgcaatcggagttcttcgtgatatctaagcatttcaccgctacaccacgaattccgcccacctctactgtactcaagactgccagtttcaactgcaattttacggttgagccgcaaactttcacaactgacttaacaatccacctacgctccctttaaacccaataaatccggataacgctcggatcctccgtattaccgcggctgctggcacggagttagccgatccttattcatatggtacatacaaaattccacacgtggaaaactttattcccatataaaagaagtttacgacccatagagccttcatccttcacgctacttggctggttcaggctctcgcccattgaccaatattcctcactgctgcctcccgtaggagtttggaccgtgtctcagttccaatgtgggggaccttcctctcagaacccctatccatcgtagtcttggtgggccgttaccccgccaacaaactaatggaacgcatccccatcgataaccgaaattctttaataaaaatatcatgcgatattcgtatgctatccggtattaatctttctttcgaaaggctattccggagttatcggcaggttggatacgtgttactcacccgtgcgccggtcgccatcttcagtttgcaagcaaactaaaatgctgcccctcgacttgcatgtgttaagcctgtagctagcgttcatcctgagccaggatcaaactcttcattgtaaaagtattttttatcatcccttaggatgacttttttgctctgttcaggacgccgtaaatttattgaccttattcaaatacctattagtcttaattgtatcactacttcataagacaagtattgacggttctatttttttacttgtactacttgtattgtttatcaatatttcaaagaacttgttgctttcgttttaaaagcgggtgcaaaggtaagggctttatttttaactaccaaactttttcggaagtttttttagtttttctttttacgctggtttctctggctctctatgcgaaagggaaagaaggtatgaaagaataactcttgccaattttctttgcgaatcggactgcaaagataagaactttagttattataatccaaactttttcggaagttttttgttcttttctctaagtgagattccactttttcactaagtcaatttgtcaaggctttcttctcttggaaagcgggtgcaaaagtacgcccttttggtatacactccaaatatatcaaactattttttctaattatttttgaaggaatttgctaaagtgctgatgcataacgatgttgtagaacatattttttatgtatgggggaattgtgtgcggaaacgacgagagggatacacattattatattacacgcgggcgagcgtaaggcaaagataaattaagaagaaaatcataagagaaaagagaagtgccatataaaatataccaaaaccggattataagacatgatgatttttgcatatacaggattattcaatcaagtatatgcaaaaagaaatgaggcaaacatacgtcaggaaatgcagaattgaaatgcaacgacgatttattcctccatacgcaggctgacaagttcaatccatttctttaggctcagatcgagaccgcctttctccaataaatgaagggcgctaccataatgaagggcggcatcttcctttacagaatatatcttgcaagaaagctcaccgagataatacttcaggcgtgccatctgaatataatccaatagggtataatcttcttctactgataaactaatcaattcatttatcaagacatatgcctgttcgcattcggtacaggttaaatcagagaaagatttgttcacaacaggatgctgcgatagctgaatgatgatacgattaaagtctccgcacatagtttatatgaattaccacatcagttcccggtggtgcgaggtttatataaaaagagaacgtgggaactatctacttacgctctatataaggtatccgctaagacccccagtgaacataagtgatagccccacgcccaattgtgtatataacaaagtatatatgcaaaagtgcgcgagacctgtcactcattgtcattcactggtaaaaaattagcggatttttatatagaatgcaacaaataaccgttctcaataaaattattaaaaagctacttccttcgctcgaaagtaaactatgacaaaagtagaaataaatatctattaaacaaacaattttgacagaaaaaaaatatgctttatcaattaatctagtctatatcatataaaaaaacacgtatctgacattctactagaaacgatttttcatttctcatgttctcataacgcacataataatatcttgtaaatcaaagacataacactatgagaaataaaatagaaaatagcatttctcatagtattaccagcattttgtccataaaacaacgcatttctcataccttttcaaggtatttctcatagtattttaaccatttatcctataaattatcaagccagattctaagctaaagaccaagtagaataccagactatacactgctttacaatatattaccagtgcttattgaaagtatatagagcggacatttgtatattttcctacctcagggaaaacgcattataaatcatgtaaaataagttcccataagaattcattatcccaccctgctattaatctttttctattgattggcatctctcttttgttgtttcttaatgtagccaatgcaattttcgccagtacggagaagtttaatgctgatatatttcttcttctggtattatcttcatggaaattgacatctagctgccaatgtagattattctcaatttcccagtgttctctactatttttaagtatcttctgcgcatcaggttccaaggaagatataaaacatcttttttccactgtagtgcctttgtttgtatttctggtattctctatatatccgaaagactgtatatttttccacttctttctaatatctgctcccagaaaaccaggatcgttgcagcaatagcagattctcgactcattcctgccatgtccttcttcatgcgtctcatatttgtcaaatcgtactgttgtaccttttgatacaatactttctgttactgacagtactatttcctttaatttcggttgattatctttcactataaaaatgtagtcaccttctccctttatgactttctctgcaattgtacgctggcatcctaaagcgtcaattgtaataatacaatcttttatacacaacatatctaataattcaggaatgacaactatctcattttccttttcttgtgtacataactgtccaagggagattcccagttctgttgcaaatgcactgatgacatgcaatttgtactttcccgtattcgaatcaggaagcactccttgtttacgatgacgcttgtcctgttcggattcataggctcctcgtatggttttaccatcaatggctatatgccccgaataacatttgagaatgctttggacccattgcctataagattcttcaaattttaaaggatctaatgccgagaaaaagcgattaaatgtatcatgggaagggataccattaaaattggaaagcttggctgcaaaaaaagattctttacttttaccaaagtcttctattgaattccaagtatcagcgccacatataacagcagaaattgcaataagaacaatggtactggcctgatgttttttacaacggtctatccggttatctatcaatattaatgaatcagcaaattcatgtaggttgctgatctcaatctttcttttagtttcttgcttcattttaattgtgatttataatcacgtaaatgtactcaaataatattgtaaatgaaagataaatatcttattaataagatgaaaagacaatattggtgtaagataaatgtataaaagattaaggaaagagtataatgcgttttccctgtttcctacctgtatctgtatcgttccactccagtgaacaggcttgtgcactagagtgaaaagaaccgtccactcgagtggaacgatctgttcactggagtggaacgatacagatacaggtaggaaggaatgaaaatgattaaggaaaaacataaagatataaggtgaatgatacacaggaaagcagtaaacaataggaagttgattaataaacgacataaggaaaggaataatcgcaagtccggcgatagtccggaaaaagctacagccatcatgcatgagaaatgagcaaaatagataaaaggagtatgagaataagaggagaaatgagttgaaaccgatgagaaatgcagcttttttaaggataaatgatggaaatactatgagaaataccattttacagtttatttctcatagcattatattattgatttacaaacaaataccataccacttatgagaacatgagaaatgaaaatgaaaaatcatttgcaggagaacttgaattcaacgaaaggttattttttaggaaagagcaaaaaagaaagagataaatcaggaatccggccgaatccatataccgtataccgaccgaccgagcaaaattccttttcagttgttattcatatatatcatagtatacacaataaaagtcaatatcatggagaagaatatttttcagttagataatgagcaactcaaagaaattgcccgttcattcaaagcaaaagtagaagagggattgaacactgaaaatgcagagatacaatgcattccaacttttatcactccgaaagcaagtagtattaatggtaaatcgttagtgcttgatttgggaggaaccaattatcgggtggcaatcgttgacttcagtaaagttcctccaaccattcaccccaacaatggttggaagaaagacatgtcggttatgaaatctcccggctatacccgcgaggagttattcaaagaattggcagacatgattaccggaataaaacgggagaaagaaatgccaatcggatattgcttttcttatccgacagagtctgtgccaagcggagatgccaaactcttacgctggacaaaaggagttgacataaaagagatgatcggagaagtggtagggaagcctttactggactatctaaacgaaagaaataaaatcaagtttacgaatataaaagtgcttaatgacaccgtagccagtttatttgcaggacttaccgacagcagttacgatgcatatataggtctgattgtgggaacaggcaccaatatggctacttttattccggctgacaaaattaagaagttaagtccgtcacataaggtcgatggattgattcccgttaatctggagtcggggaacttccatccgccattcctcactgcagtagataatacggtagatgtaatctccgacaatccgggaagacaacgtttcgagaaagctgtatccggcatgtacttgggagacattctaaaagcgactttccctctggaagaatttgaagaaaaattcgatgcacaaaagcttacctctatcatgaactatcccgatatttataaagaagtgtatgtgcaggtagcacagtggatatatggcagatcggcgcaattggttgcagcttcacttacagggcttatcatgttgctaaagtcatacaataaggagataaggagaatttgcctggttgccgaaggaagtcttttctggagcaagaacagaaaagataaaaactataatatgattgtcatggagaaattacgggaactcttcagtttatttggtttggaagacgtagagatcgacataaaaagtatgaataatgccaatctgataggaacaggtattgcggcattatcctgacacgttctaatttgtcattgcacggcaggtcctcaatcggcctgttcataaaaattcgatgctgtatcaaatttactgatacagcatcgaacctatttcagacttattaaatccggttcaatatttagatagaatatagaacctaaagtagctattatttgatcttcagtgcaaaaccgcctccgggtgccaaatgaatcttcaacttactgtcattctttatccggaaagattcacatttataatcacgtccaacccggtgggcattcactccatccttaaataatgtagcatcgtatgtcttgtcgcccaagaaggaacaatctacttcaatatcacgtgccgtccaatcggtaattccacctacataccagacatttcctgcccggcgtgccgttacgatgtactctcccattttgccatcaagcacgatactttcatcccatacggtcggaatattggcaataaattcggtcgattccagttcgcgcatatagttgcttggcgcatcgcacagcatattgaaaggagactcgaataccacatacagagcaagttggcgacagcgagttccctggctcataggttccgagttacaaggataatagttacctttcgaagcattacgcatcgcgccttgggtgtaatccatcggaccggaaacctgacgggtgaaaggcaacagtacgtcatacttcacctgatcgaccgaagccggactccatttcatctgttccaagccattaaccccttcaaagttcaacacattcggataggtacgattcaagccggccggtttatgcgttccatgcaaatcgagaatcaatttatatttagcacacatttcggcagcccgataattgaatgctgtcatatactgatcgtcacgatccataaaatcgaccttaaagcctttgactcccatgtcggcaaaataacggcaaacgttctccatatcacgatcgaaggcataataaccagcccaaagaatgatacctacatttttggaagctgcataatctaccagttctttcagattaatatctttcactacttgcatcaaatccgcctgcaggttgactgcccaaccttcatcaaggattacatattctattccgtttgcagaagcgaaatcaatatatgctttataagtcggattatttactccggtgataaaatcaacgccatccaagttccagttattccaccaatcccatgccactttaccgggtttgatccatgaaatatccgtcagacgggaaggagcagccaacaaatagctcaagttgcttgccgccaaatctttatcggaagtggtaacaatgctcattcgccatggaaaacttcgggggttatctactttggcaatgtaagcttcacgctctttcaccaacatctgaagttgattgtgtccgccctgcaccgtcttcttgggataaggagcgaattgacccgtcaaccggttttccccttcagcagcagataaatagagaccgggataattctccaaaccggattctgtgatacaaatcttgacaccttcaccagcatccactactaacggcagaaacatcaaacgttttttattcagtttcgataatcgatcagtagtataagtgttctcgaaagaattgaaatattgggattcgtaatcaccgtctttccccgcttttacatacggaacagaggctaccatatcggacgggaaacggtaatctacagtttcatccactacattgaaaggtttcttcgaccggctgacaaagcgatatgcaataccatcattgtaagcacgaaactctacgttccaatctttcttaaaccggagagtcagttcattatagtaatctcttagttcgttggcgcgatagaaaggagaaggaaccatctgatctacttttttcccggaagtgccggccaactttgctttctctccccaaacttctccattatccaatgtcattgaaattgaagaagaagccagtatctgacgtccgtcacaatggatgtcataagtcaacttatcaccgacggtaatagttgtttggagtttcccatccggagagttcaaggtaaattgtttttgtgcttgtaccgtaagcgtacatgcgacaacacatagaaataataaaatcttcagttttttcatggttttaattatagtagttatcaaatcataagaagaatgatgcaaaaataaaataatatatggtagtaacctatatgaaaactaaaaaacagaaatgaaaaatgaatacgagattctatcttcttcctgtcagagattttatgcaatcgacttcttcctgctgaaaaggtactccgttagaacgataaatatcatggaaccataactccggctcttctcccgacggaatcacttcatcccaagcaaaaatagtatttgtctttcctgcaacaaatccccaattaatagctccggtcttttcttttttcatcagaggaaggacattgcaaaaacggctgtcattgcggcgggccatatattcggtacagatcaacggacggttaagcatctttagaaacttgatgcactcggcatgctgtgcctcattatcgtaattatgataagagataatatccgaatgattcagcataaatgcattcagaacattcttgcggggagaattatagtcccagacaccggcagtaatcggttgtgacggtttacagtcgcgtacccagcgaaaaacattggtcaataaagacaaagaggtttcctcgtgtttactatttccgggttcattatataaatcccacatcaatatccggtcatcatgagcgtaagtgcgtataatatctttgacatactcttgtagaaaaggatacaaagtcagtgtatccttgcgcaagctgcacgaagggtcctgtacccatccggaattatgaactcccggcttcagttctggttgtttgccataagcagattcagcattccaacagtcatcaaagaatacaaacataggacgaattgagtacttcttacaaatattcagaaattcatccatacgttttttcatgactttcgcatcgtttttccatactacactgcttaagaaaacccgtaaggtattaaaacccagatcatgtgcccatgacagttctttatctatttgtttaggattgaaagtatccgcactccacatttctatctgattgattgctgttgccggaatataattgcaacctatcagccaatcctggtcgtcataccatttctgtattttctcttctgaccaacgatcattgtttgaggagttgcactcctgcgtacaagcatttatacatatccccactaaaaagaataaaaatgcaacactaacacaccatttatttttcatgctatttcaattgattaatatacaagtctatttattttaattttcacctttgagttatactgtatccatcattcagctctaaaccgcttggtttgtacatcacgggagttcgatcctaccatgacatcaaattctcctggttcatagatatattccaaaccggaattatagaatttcagatcattttccgtgataacgaagttaatgtcacgactttcaccactcttcaggaaaatacgtttaaagcctttcaactcctttaccggacgggcaatctctgcatatatatcacgaagatatagctgcactgtctcgtaaccgtcgtagtttcctttattggtaacagtcacagaaaccgttaactcaccgtttttaggtaaagtttccgagctaatctgaagatcactataaacaaagtctgtataactcaaaccatatccgaacggatacagaggctcattactctcatccagataattgctggcataacgattaaatatacgattgtcaggatcaggacgaccggtattcagatgattgtagaataatggcaactgtcccaccgaacgcgggaaagtcgttgtcagtttaccgcttggagctaccttgccgaacagtacgtcagcaaccgcatcccccgtttcactacctccaaaccagacattcaagatggaatgtacatttgtagcctcccagttcaaaaccaaaggacgacccgtgaacaaaagaagtacgacaggtttgcccgtcttcaccagagcttttaataagtcctgttgagcatcgggtatctccagattggtacgtgaaaccgattcaccactcatttccgcacactcacccaaagcagctacaatcacatcagcacgggcagctatacgcaaagcctcatccaataactgccggttgtctccacgttcaagcggccgaatacccgtagcagccttttccgtttctgcatcataatatatgttactgcctttcgcgtatagtatttcagccttatcacccgctgccgaacggattccttccagtaacgttccgtgccgggaaggagtacatgtcatactccacattccacacatattattacgtgcatctgccatcggaccgatcagggcaatctttccttttatgtccaaaggaagcagatgatgatcgttcttcaacaaaacaaaagtttcagttgcaatcgtacgggcggaagaacgatgttcggccgtataaagtttttcccgggtacgcagagtatcacaatatttatacggatcggagaataaccccaatttatatttagcttccaggacacgacggcaggccgcatttatctgttcttccgtcacttttccttctttcagggattcttccagtgtgttcagaaaaccacaggaaaccatatccatatctgtccctgcctgcaaagcacgtatggaagcttctttcagaggggcgacaccgtgggaggacatttcggctatcgaattataatctgtcaccaatagtcccccgaaaccccattcatcccgaagcagatcggtcagtaaccatttattggccgtggcaggaataccgtcgacgatattaaaagaactcatgacactacctacaccggcatcaacggcagctttataaggagccagatattcgttatacatacgcaggcagctcatatccaccacattataatcacgtcctgattcagacgctccataaagtgcaaaatgtttcacacaggcaagtatttcatcgttgccctgcatattgtttccctgataaccacgcacatacgctttagccattaaagaacccaggtaaggatcttccccactcccttctgcgatacgtccccagcgggcgtcacgacaaatatcgaccatcgggctgaatgtccagttaataccgtctgcgctggcttcaatggcagagatgcgtgccatacgttcgacggccagagtgtcccaactgcaagaaagcgccaatgggatcgggaaaatagtttcgtaaccgtggataacgtctgcacctacaagtagaggtattttcaaccggctttcttctaccgcaaggtgttgcagggcattaattttctggatccccttgacattgaagaagccgcctatttcctgtttgcgaatcatatcgctaagttcaccgttcatcaccgaacctgtcacgagatcaccgcccgaaggcaggttcagttgtccgagtttctcacggagagtcatccgctccattaagtcggtaatgaaacagtccatttccgcatctttctctcccccggacggtgagcaggcaaagagagtaagcccgcaaagggcacaagatataagattttttatcttcatttttcttgttattgggttatttatgcttgttgtccgatttttctttccacaccactactcccgcaggttcaaggcgtgcactgccaatcagtacctccgcctcatcgggaatgactatttcctgaatgtccgacgtataattcaaggcgatgtaaaaaccgtcacgccattctttcactactccgtacggcaaatcttcggtcgatacgcctgcttctgtatatacacgacgtaccacctctttttccagtttgccgtcatcggtatccgttccgatataagtgaccgttcccttacccagtttgtggtgtatcacggaagcggctcccttatagaactggtctgtatagacagcccacacatctgttccggcagccggtgtcagtacgtctccccaattattccaggcaaattccttaccctcgaaatcgatctttccgtacagattgtggggcagatggtcataatacaggctatttattccggctagttgatgaatcggagcagccaaaggagcctcccacagtttggcgtcacggtctttctgaccggtacggcaagtcaggatcagatgtcctcccttcttcacatattcagtccaacgttccaccagcttgttgtcaagcaactgataggcaggagctatcaagaaaggataaccggaaaaatcctctttctccgaaatcacgtctaccggagctgcaaaagattttagcagattgtaatatttatgcacgtgagccatcgtccgccattgatccgtctgccgctgaaactccatttcccaataattactcatatcgaaaagtaaaccaatacgccgggaggccagttgaccgggcatacgatttttcttatcataggcggcacgcagttttttcatctcctgcgtaatgcgtacatattcttcaccgcccggagaaagagttactccatcagtcattatcataccgtaatgatattgctcactgcctttcagaggttgacggaaacggtaattgcatacgaattttccaccacctgcaaagacgtgatacacccacatacggatggcaccgggtaaaggttgggggttatacactccccagttcacctgcccgggttggagttccataactccaaaggctttacctacgcgattacggaactggtcgtttgagaaaccgagatcttccggaatacccatccggaaaccctggctgcctattccctgattatgtccggtcaccagatagcgggtgtaggtcaggaagtccggatgatcgatccgtaccggatcgaccggattgaaaataggtatcaggttggtagtgatccattggtctttgtggatatgccgccgaaggatgtctgcctgcatattgacaaagcctgccagttcatccgccataaagcggttcaaatcgagcatggcgtgaggattggccttatcaggtacttcctgctggttgggaaggcgaacctgctcgaagttctgataggtttcactccagaaagaggcaccccaggtatcattcagtttgtcaatagtgccgtatttcttctgtaaccagatacggaatttggcttgtgcattttcactgtaatctaccaccccgtagtgtcccggttcattgtcaatctgccagccgataacagtgggattattgccataatgtattgccaggcgggaaacgatattttctacataatgacgatagcgatcgctactccaggaagcgtgctgacgtcgtccgtgttgaatggtcactccattatcccgttgaatcagtatgtcgggatattttttcgacagccagacgggaggcgtgggggtaggtgtacacatgattactttcagaccatacttctccgccagagagactgcacgatccagccattcaaaatgatattctccctcttccggttccatcatagaccaggcgaactctgcaaaatgggtgaatttgatgcccatttccgacattttcttcaaatcacgctcccattgggaggaatcccattgctcgggataatagtaagagcccaaagcaaacaactcttccggaggaaaagacttatcgaccggagactgggaaaaggatgataatgaaaacaataaagttaagacaaataggaaattcttcatgaatattatttttagaatctatatgataagacatttctgaaagaaaaagccacattgctatttgtataaagaggtcgtgtttcggtgaaacccggcctctttatcttatgtaacactaatacctatgtcagactattatctctttgtaaacgtacaggtatttgtattcatatccagtttgacatgatatataccggctctgaaattatttcccggtccaaagttctctgtttccttccattgatctccatcccaataaccgccccgggctattaaatcaccttcagatacgatggtcacatcaaacgaagtaatttcattattccaaccttttcttttataaaatctgaacatgaaatcgttgttcagaaggaggttagtttcatatacacgatctccggtcttcacacaacaaataaagtcttttggattatcccatccccaatttccaatgtcatcgggaaggagtccgctgattctaggatggccgaaggcagctccagttatccatactgtttccgggaattccgtatcggtcgttttctctacatatataagttctctatccttattatatgaaatccgatacttaccgtccggagcgttaaacttatattgtccattttcattcgtaaagtattccggttgaagcatatagtccagataactaaatccttcgaaatcgaccacttgtcctttcgtgaggtttaactctacagcgatatagcttggattagtagattgagtcagttccgtaccatttattttataagattccggtccaagttgtccttcatccaccttatcaataaacatacatatattcttattcaaatctatccggacacgatatactcccggtgtgaaatccggtccggctacaaaatcaccggtaaaatgtccgccaccagtgccacctgttgccggatcactgtaataccatcccttacccaataaattaacaggttgcgtattgacaatagtactagccagttcacctccccaaggacgttgtttgtagaatttaaactggaaatctttaaccagataaagggtggtttcaaaaatattgtctgctaccttcacacactggaatgcatcactcggcaagttgaaagtccatgcaccgacagtcacccgtccggcttgaggatgtccgaaactggatccgcaaacccataacccatccggataatttaccgagcggttttccagatatgtcagtttgtttatcggatcataatacaatttatagtttccgtctactcctataaatgtagctttatcttttgttatgttttcaaagaaatccggttgaagcatctttctcacatcaccaaaattgctgaaagtcacttcatcacctttatgaagttccaaagcaatgcccagaaaagatgaagcctcttctaatatacccatttcctgaccgttaaccaggaaagattgttcttgaatattctcatctttcgcttcaaaagcacaagtgttattgttcaaatcgagcgtgataagataaactccgggttggaacagcggtcccggaataaaatctcctcccgtctttccggcaaccaagaaaggggtagttagagtgatattatcttcgggaagagtagtgatctcattgtctccctctccccagcctctatgcttgaaaaacttaaatgagaagttattagccagatagagagtcagttgaaaaacattgtcggcacttttataacaataaagcacattgttaggtccgtccatactccaaccgcttgtggtaaccagcctcgcttgaggatgtccccagttggctccgcagaaccataatccgtccggataggtcgccccggctttttctatgtacaaaagctcattagcaggatcataaagcacactataatcagccgtctctcctttgaaacgggccttattttcggacacatattcaaagtaatccggtgaaagaatggattctatttcgtcaatccccgaaaactcgacttcctgtcctttttccagatgaagcttttttccctgaaaattagagtaaatctcttcatccaacacttgacctcctacagaaagaggagaggcaagtttccattccggccattgatcccatttctgtacgtcatcactgcaagatgccgttaacagcaacagaaggaccgtatatatataatatttcataatgcagtcatattaagattatacatttattttttatatgctttcagcagagcttgataaactgtttcgttcaccttcacaatacagccgtgtcgtgcgccgggtctgtccgtaccatcctttacattaggtccggagaaagtacgttctttccatggcccgtccatagaggtcgactgaaacaaatgatacccataaggtttggctgcataagattccgcataaataaaccaaccgctatgattcggccgttcgataaaaataggtgcttcacgcatcatatcattcggagtgacaggtgctcccggattggtataaggaccagtcagattggaagaggtggcaatacggactgttttccctgtttccggggcaacagccggatcgcgttcgtctttcataatcgcataataaacaccgtttactttacggataatagcatcgataatagccatattctcatccgtaccggtaaaattgaataatttctgtggttccgtataggtctcgaaatcctttgtcaacacatagagagtgcgcatactgtcccaatcgtccttatccgggtcgttgcaggcatgccagcttataatgtactgttcgctatccttgtcataaaacattttgggtgctccccaataataggtagtatagaatccctgtgcattactacgattaaaaatcatttcattcaactgggtagatgtccatgtcaccagattttccgaacgccacaaagccagcggattgactgcaatcatatagaaagctccgtcatgtccctgacaaatatcaggatgtccaatgtaagcgctattgatgatccggcctttattcagtgtttcccagttgatgccatcccgggaaacagcataatataactttccataatttgcattagtcatgtgggcgaacaaatatccgccatcagtttccactggaatttcttctctgcctgtttctgcatcatccgaacacgaccaactcattaaagacaataatagaccaattatatagtaactcatacgtttcatatcttttattcagttaataggtttaatttatactttgttgcgctttgctcttatcctccgcccaacccggacgttcccaagtctgcttcagctcttttccataagaaatggcctgttcgactgcatagttaggaatcggcatgtattgatgcgtcggcattatgccttttgccttatacatttcttgcgcgtatttattaaaacggatcaagtcaatctttcgattaccttcatagaaaaattcatgtccccgctctatcagaatagcgtttaaaaaagcgtcttttgtattggttgtcacactcggcaagtccgacagcccggctcttttcctcacctgattcaccgcatttatagcagctacggaaggtacagttcctgttttacgcacttctgcctctgcatacatcaataatacatcggcccatcttgccaaaggaatatcggtaccctggaaagtagtcatcgtctcctgcgggaatttatttataatatatccgttccatctcacccccagattatctttgttgataacgacaccattcttgtccttataactggttacaatggttttcagacgaccgtcgttgctttcgaaagcatcgtagtattttttatccatactgaaagcctggaaccatccacctcccattggaaaaggatccccttttgccacatcagaaggtaaagcccacatcaggaaaggattcgcatttccatgcttcgggttaccatcagcagtagggctacaactgacagccataatcatttctttattgaatttattggcattcttgaacaggtcaacgtacggagtacttccggttttaaacaaatcatatttgcccgtattgagttcattatacatatcaatcgctctctgataataaccttccatgtgttcaccctcgttcagacagtgtttcatcaggcagaagcgggcatagtcacgcgtatagcgtcccaaatccggggctacttcgggagcattctttgcggcaaattccagatcatccgtaatccattgagtcatttcatccaaagaagggcgcacggtattcgacaacgcttccggatcaattactttttcgggatccaggattaccggtacgggaccgtaaacatgcaacaggaagtacatcatcaatccacgacacaaacgtgcttctccaagtaaattattcttcttttcttccgtaagagcagtcaggggagctttttccaacgttccaatcacttcagtcatacgggtcacctgggctgttttcgggaaatgattcaagttaccaccgtcgtctacatttccacgccagtaataaaagcaattactgtaatctcctttactaaggcgttcccagtctgcacctactgtggtagcaggcgcacatatatcagaagcagaatcaaacatacgcaccgctcctccagactgtatatgaataccatgttgcaaaccacccgaacccatatcatacgtccaaaccgtagtataaggcaggtagcaaaccatcatataggaaacatactcttgctctgtggaaggatattctccctgtaacaaagctccgtaaatataaggatcaaaattattctcacaactaccgaataagagttgcaaggaaacaagcatcggtaaaaagaacttctttttcatacgacataatttgttagatttcatagcttgaagtttagaaggttaattttgcacctattgaataaactctcatttgaggatattgtcctccggtcagattcgaagaagaagtgttgatttcagggtcatatcctttgtatttggtaaaggtcaaaggattctgaaagtcgacaaacacacgtattcctctaatataccctttaaatatggataattctttgggacccaggttatatcccaatgtgatgtttctcacacgcacataagaggcattttctcttgtataatcaaagcccagattttcgggtaaagccactgatttactgattgcgatacccgggaaatgtccgttcatgtttgtctgggtattccagatgttataagaatagataccaacattgtgcgcatccactcctctggagagatttccggcatctgcactataactatatgcgtcattccatttctttacacctaattgtccgtacataaatatatccagatcaaagtttttccatgtaaatgtattgccaaaaccaaaatataatttaggaagcatgttatccatgtaagagtcattcacgtcaataattccatcaccgtttttatcttcgacaataggataacccggcatacaggcggcaggtcccaatgaacgttgcgattcgggcatattactcttatccacatcgataatatcggtcgttttataataatagaatgcattcatcggttcatttttccttttctgatatttctgataatcatagttaggcatacgttctatccatactgcgttataatgggacatcgtaatttgagaggtccatttaaaatcatgtgtctggagattcaatgagttcagacttacatctactccggtacgtttataatgccctccattaattggacgtgttccgtgcattcccaataattctgtcggcgctgttcccaacaaatgggttacgtcgttacggaatacatctacactaccccagattcgatctctaaaaatagaaaaatccaatccgatatttttcatgactgtcttttgccaggtgacatcttcatagttagcgccggacaatatgtagggaatgtaagttaccgaattattattgaattgaacatcctcgcgggttgtcgttacaataccgtatagtgttgtacccaggttatcgctacctgtttcaccgtaactggctcttaatttcaacatattaatccaggagatattctttataaatgattcttcgttcatcttccatgcaagagaaacagatggaaagaaggcgtatttcttactgggaaagaatttatccgtaccgtcacgacgcaatgaagcggatactacatagcgtccgaataagtcgaaacttcctctgacaaactgtgatctcttttcattcttatatttataggaagtcggatagaaaggaccgtctgccatacctacgctacttccctgtatatggtcattggcattttcataagatatatccgaaccatcgccactatcaagataacgtcccataccggccatcaaattcatatccaataactctccaaatttatgttggaatgttaatgtaccttcgagagtgctttgctgcctttttccatatcctaagtttcctctggatttacgttgcaatgcgtagtaaatatcagaaggaatgtaagaatcacgagaggtattttccttgttcaagccatacaatactttggctgaaagcatattcttgataatatcgacatccagtgagaagttcatgtagtaaccattttgctcggatttgtcattaatatcttgcatggaaacgggattaggcgtccggctgaatacattatattgtccttcggcatcgtacacgggaagataagagggatagaagattgctccgaaaagtgctccggctccctgatctcttaagtttccgacatctccgccgacagtagagttcgtgtaattattctgattcaagttgactattgttgtcagtttcaggaaattagtcagctgggatgtgatgtttgtacgcagggagtatcgctccatatccgaattataaacggtagcgtcttctttatagtagttaacgcccagatagtatttaaacttttccgaaccaccgctaatcgtcagattatgattggtcactgcacctgttttcagtaccttgtccagccaatccgtagtcggggcattggctatttgtgtcggtgtaaagataggtgtccatttatcgtcataagcggcatttccataaggatactggcctttgtcatataaataattctctttactgaacacattcaccatgttcatcagttcgggtccgctcaatacatccaggtaaggataatgtttttgcacggaatagcttccttcatacacgatggtcggttttccctcttttccttttttggtggtcaccagaataacaccatccgctgctccgataccataaattgctgcagaagcatccttcaggatttcaatagattcaatatcattgggatttaatcctgccagtccggcacgattgacggaagaaggaagtgacgtacttcccgtgccgacttcaaaagagccgctaggcataactactccatccaccacataaatcggtgtaccacctccacgaatggagatattgatgcctcctcccggctggggactggcaacggttgcctgcaaaccggcagcacgtcccagcaacattcctgagatattgctagtagccgctttggatattttttcagtttttacggtagcgatagaagtagtcaggtttttacgggaggttgtaccataccccaccactaccacctcgtccaatatttgctgattttcagccaaggtgacagataaagatacccggtcgcccacctttacttcctgtgtctgataaccgatataggagacttccaatacagctcccggtgacacttccagagagaacttagcatccaaatcagatgcggttccgttggttgttcctttttccttgatggtagcaccgatgatcggttcaccgttggcatcgctcactgtacctgtgactttacgctttttagtgtctttagaggtattctgccgcgcttgccctttttggacaataatattcttgccctttacctcataaacaacttcttgcccgtacaatatctgatcgatagcttcattcaattgttttgcctttacacttacaatcttcctggtatccaggtctcccactttatatacgaaagaatatccgcttttattcttcaattgcgtcattgcttctttcactgaaacattattcattttcaatgaaacggcctgggctagtattgctatgttaaggcaaaagagagccacgaccattaatatggccttcttcctgtaattcataaaataaacaaattatttaattaaaacttgaataactcgttttaaaagagatgtattttgctaactttgcataatctcttttgaaaacatgctcacgtttgaaagttgttgaagaagagattcaggagccggaagatgttcgagatcttccggtttttatttttctctccttatcattcactaaagactattcagtattatttcctttactcatattcttcaattataaggttaaacaatcatagtattataatctctggtaaccggttaatagatagttatattgcgctcttcaattttatattgtattttctctgtagatgccaacgcatccaacacttcctgaatactttgttcccgacggacgaagtttccgtagaaccggaatttatttaatgaatcattagctatgtggatattcacattgtagctacgttccagttctttcacgatgtccggcaaaagttcttcatcaaaaaacagatagccatccgtccattgggaggcattggaggctgtgaccgtttctacggtcatcaatccgttcgctttgtttaatatcgctctctcgtcgggtgcaaggaaagcttctttctcttttttcagtaaattatttaattccactttcccttccaacaaggatactaccacttcgtgatcttccggataatcgcggaaattaaattttgttcccaatacctgcaattgcaaatctttagtctttacaaagaaagggagtttctcattccgttggacttcaaaatatccctcaccttctaattctactttacggttatctactccaaagccttgtgagtaggtcattcgtgaaccggcattcaaccaaaccaatgtaccatcaggcaaataaagtttcgttcttgatcctaaaggagcctctacggatatatctgcaaaagtgtcttttacattcactcctccctgccaatatgagaagcatcctactgcaagtatgactgcgataatcgcggcataacgccacaacgccgacaaacggaattcctggcgaggagctttctccacttgcttccggctcccgatacgattcttaaaggtatcgaatgccttgtctttattgtatttcgacgcggcttcacggctcacggcagagaaccagacttcccgttgctgaataaaataatcctcattttcaggtgatgcagctatccatgcttttagttcggctaaagcatttttgtccaaaccttcggtcagataggttgcaatcaattcatcaatatgtttcttttcttcttccatttttctgcgttctataaaggagacagtagatttttaattgagggtagtctaaaaatgactttttttcgtttttacccgaaaaaaaataaaagtagagtaatcagatatttacttagattcgtttgtaaagatgctaatgcattctttatatgatacttaaccgtattgacagagatgcctaactcttgagaaatttcttcgtatgattttccttcaaaacggcttttatcgaacacgcgacgacattcgttcggcaatttatcaatggctttatatatttcctcttccagttcacgctccagcaatgtccccaacggatgcgaatcggatatcgtcattttatcgtctgttatctcatcgggcatcagagatgaaaacgcaatctcgcgcttttcccattctgaattaagatagttgatacaacgattacggacggctctcaacaaatagctacggatggaaacggaaatctccagcgtttcacgaatctcccataaatgaaaaatggtatctccgacaatggtttccgcaaggaattgatctcttacatagccgctcgcgacatgacacagcagagcatagtgacggtcatagatgtattgataggcatcttcgttacctgtcttcaactgctctactattaaagtttcagtatgctccatggatgtattagtcgagttaatggcacaaatttagagaattattcgagttaaaagcaaaattaataagaaaaccctccaaagaatttcttctctggagggtttaacataccatttaatataattcgtttatcaatacggtagttacactttcctttcctaaataaaaagcctttgcttttatcagtggagcatcacatgctatctgtgtttgccattctacagaactttccgtaggttcactgccatcggttgtataccggattaccgcattgggattggtagtattaacaagtaacaatccatcctttactataatacctggaggagatacccggaaattaatacctcgttttgccaaacggggcaattcataagttacaataccggcattatattttcgtttggcatccatatatactttgccgtccggagacaatgcccacgatggttgagcattccaaacgcgttctgccagtccaaagactttcgggaaaagataatattctatttgttcgaaactacggattgtctccgcccagatttgtccggacaaacctttgatattcttatacccctcttttgtcaaaggttgcttaccgtttgaggctgtttttacatccacagattcacctttcagattccgccgtaaagacttgtaaatatcaaaaggcaacatatcaaacgttacgtactcatctacgtaaccaccccaacgtaaccccggttcttccacatgataacaataggccatatccaaatagaaattacccacattacagagtataataggatagcccgcatttgctaacttatacggaacttcatccccaccctgttccggaattgtattccagcaataattcaagaccttgctatttctgaaatgttcgttcacggtattatccggattcataactatgtcttgccatccaactgcttgtatattacgtttatccaacatttccagaatttgccccagaaaataatctttcaaatcccgtatcttagtcagtccatgttttttcataaaagtacggcagatagaagaaccttcccaaataccttccggcacttcatctccacccacatggaaagcagtcagttctactcctgcatcctgatacatctgcacgatttcgtcaatcactttttcaagaaaatgataagtggaaggcatggcaacattaatcacattgtctgtaaaattttgtgcagacagatattgagaagtatctgcaaagtcagtcaaaagatattcttccgctttcgattggtctatatctatatatttctgataacgggcattcatggctttaatcgctgcccgggaatgtccgggaatgtctatttcgggaataactctgatatgcctttctttcgcgtatttcagaatatccatgaagtcactgcgagaataatatccgttggctaatgaagtagtatctgtctcattccatccccaggcatacgcaggataaaggcacatctgttcatctgtggtatgtcctctgcgagaagctatttctgtcaattcctccaatccgggtatttccacacgccaggcctcatcgtcactcaaatgcaaatgcagtacattcatcttatagaatgacaatatatcgatcagtttcagcaaatctgctttctttgtaaaattgcgggctacatccaacataattccccgatgccccatgtccggataatcggtaatatgaagattaggaagcggagcagaagttagttccatgttatctaataaggcaagcaatgtttgacaagcattaaatatgccatgtgcatcattagctttcaaagtcaaccgattattctttatcacgatttcgtaatattcatcgggatattgacaggtaataggaacctccattttcttcaattcaatgattgtttcttcatccttatcggaaacgctgcatcttaataatgaagccagttgacttttcaataaaagagcttcctctttaaacgtatcatcaaacttcagacagactttttgagagaaagaagaaacaccgcccgtcttttccacttttttaggagcaggaaaaagagaaagcatatcacaatctaccggtttgctgaaatcatcattctgcttatagaaataatttccatctgcatagggaaagctgttcctcgagctaacccattgggcatcgggcttaaaaagctcgatctcgatggggacattttgcggttgtaacggttttcctttttcatcagtagttaccacataagccccttcaggaaccgaggacacattaatcacatttccttcactcaatatggtaaaagtgattgtttcacccggtggcaatgccttgtagtgttcagtggggtacattttatagtaagtcgaacctaaacattcaatttccagcggtgcattaataggttgctgataataaataggtgtctgattaaaatagatcacccaattattagtcaaggatttattcccattattcgtcaggcagaatgtattcttaaaatatctggcttccacactatctttttccagtttccatgttaaggatagctgtgaggaaaggggctgtttaccagccccgcaaccaaacaggcatatccccaacatcattatccatatattcctcatagttatcataagggaattatttagttaatgaacgaatacattccacctcttctgccgaataaggagttccatcactacgaaatatatcgtggaaccacaatggaggttcaacaacatcaggcaatggagtatcccatgcaaagatcgtatttgtttttccggctacaaggccccagttgattgcaccgatattttctttcttcagcattggcataatatcctggaaagtgctattttgagtacgtgccatatattccgtacaaatcatcgggcggccatattgcttcaatgtgtcaatgagccgttgatgcgaatccaaaccttcatacgtatgataggttatcacatccgaattttccaattggaacttattcagattagtcaggctcatatcccaaactccggccgacaaaggttgtgacggattcaccgttcgtccccacgtaaatattttctgcaataacggcaaacttctttcaccgtatctatatcctcccgaacctccgggctcattatataaatcccataatacaattctcttatcatccttaaaggtagtcaggatatctttcacatagctttccaataccggaagtatcactgccgtatcgcctttataatacagatcacccgggtcacgtgcccatcccgagttgtgtactcccggctgtggttccggctgtttgccagcctgatatacaggattccaacaatcatccaggaagacgaagatggtagagatatgatgcttgtcggcaatagtaaggtattcattgatacgtttcttaaagccttccttatctgtttcccaaaccaggtgatgcaaatatacgcgcatacagttcatgcctatttcttccgcccaacccagttcacgatcaatagtcaccggatcaaaagtatctgcctgccacatctccatttggttgattgccgtgctcggaataaaatcgcatccacgaagccatccccattgtttataccactcattagcctgctcttttgtccagacctcacgaacagagaccgttttctggttgcaggcaatcaacatagcaccaataaaaaaggaaagtaatatctttttcatataatcgttttactttatcaaattaaaaatctttttattttctccacgtaaatattaccatatcacccggttcgactgctatcgtagagccgtccggagtagtcgttgaaccatttttcaacactctgctaacagaactatccacatcgatagacaggttcatcacattacgaaaatctctatttactaccacaagatattgattaccacctttctccaggacagagacaaccgcacctgtatcactcgtagtcaatgattttataggagtcggcagacttcccaaagccttcgtgccttcaggtatttcacttccggtgtgagatacagaaataacctgtgctcccaagaatatacctgcaagctgttgtacttcctgattaactgtcttgaccagatcatacacttcggtcggatcgtcatgttgaagtccgcgataggtaaaatactggattgcctgcgcaccataagctaaatcactgaagacttgtaacctcaactcgggcaatgtcggtatcttataaaaatgagtttcatcaagcttatgagaaagtgcaagtgcaaatgcccaaaacggctttttgttctctttagcagcagccgatatttcttccagattccgataccagtccggacgaataatgcttggagcaccatttatagagacaataggataattgtcaaacgaaataaacggaacagggacttgttctataaacgactttacattttcagaataaagttctttcccccatgcccaattggggtacaagtttatataacaaggatgatggctgtcaatggttttaattttcttcaccaattcgcccaaacccggcaaatcattcacttccggttcatccttcaaatgataggcatacaaagccggatgattcatcatcgcttttacgacctcttcggcagtagcaacagacaagagatccttagaagaagttatcattttcactccggtcttctgtgcggcgtcaagcaccttcaatgttgtttccaaatcatcataccatcccagataaatattaatgccggatgctttcatcaccgggaatttctccagcgacttatctgcttccactccggtccatgctataatcgggaattctccatcagttgtagggatataagaattaccctgaatgatctcaatttcctgtgtctttactccattaggtactacgcggaatacagccgtacgtccggttcctgtatttgcatttgcagtaattgtcaccgttccgtttccactccctttggccggtgagatggtaacccaagactgatccgtctcgtttacaaatttccattccgtattagactttatcgaataaacctccgtaaaaccgtcattaccgatctgtaacttctctaaatttccggaaatagaaaaagaggctttctccggatccatcgaacaagacattaataacattggcaacatcgaaaaaaagaacgtaaccagaaatttcttactatatgttttcattgatatatacataattctattgaatattaaattaaagactattaatcatgatcccctcttaattgtaaggagtcaatcgtatcacttcactggctttatcaatatgtatcgtataaagtccggctttaaaatcaggaccgggaatcagatcgccgggagcatttctcgtaaccaagttgacaggctcaaccgtatatgagttcttcgtatcttcctcttgcgcccatccatatcctctatagaacttaaatcccatcgtctggtcgatgtatacaactgcttcgaaagtatttgcaccgacctttttaaagaagaaccactggtgaggatatgcgaagtcccaagcaagcgtagccacataaggttcgcgtggaaatccgactccagtaccgagaatatacatcacctccggataaaaaacatcccgcggacgttccatatacataaaaccatttgatgtattatatttcaagttataaagtaccgacggaccatcgaattttgctttgctccctgaaacatctttaaagaattccggccggagcatattggtgacatcactaccaaaacctataaaattaatcttggcactttctaccaactgaacatccaactggacatatcctcctcccacatcaaaaaagcgggacttatcaatatcaatgctgtatgtcaaagtcttatcagccagaaaactcaacatatcaaaagtgatattctccaatgtatagcttcctaccttaggagtcggaatcgaagtagctgcatcatcagtcacaatcgcgatcttatcgtctgaatatccccataccaaaccggaataatcaggtttgttatttattatcttttcggcaactttaaaatggtcgccaatccctgccaaatccgccgcactcgtccggaaactataatccgtttcattctgactctccttgtccatttcatacacatttcccaaatcatcaacaaggtataattgggaaggtgtttccggacgggtcaccgccacacttgcggcctcatccaaagtcagagtcgactcattgccacctaaatcatttacagcttttatagtcaccacaggacgtccattctggaaaccggcaacaaaaggtaaagtagcttcctcttcaataactgcagaacgtccgctcaatcctttagacaaattcaagatttcggctccatccattgtcactaataattggaatgaaaccaaatcattatattcatcactgacctgtgcggtgaacttcactttatcaccagccgccacaaccgtttcaccattcactccccgcaatacggcattttctattttaggttttgaaggtgtaggccactccggccattcacttggcttactaacatcatcttttgcacacgaaaggagcaataacgacgacatgaataatacgtatatctttttcatttttcttaagatctctagtttaacaataatgaatgatgacattaattgcgagctgccgcaagatccgctttccatccctcacgttcaaatgtctgtgccaacacttttccataagattccgaagcttgttgaaccgcataattaggaataggcacatattgatgtgtaggagccactcctttgatcttcgctgtacgctgcgcatactgattaaaacggatgagatctattttacgcatcccttcatacaacatttcatgtcctctttccgtaagtaaagcatctaggaaggcttcaacattcgctgttgccgatgacggaagatctcccagtccggcacgcttacgcacctcattgaccgcagcaatagcatcagcggacggagctgcattgtttttacgtacttcggcttccgcatacatgagcaatacatctgcccaacgggctaacggtatatcagtcccctgaaaagccgtggccgtttcaaccgggaatttattaattataaatccgtcccatgtggttgtattccggtcaatccaagttccggcagtcgtataatatttggtaaggatcacttcacgacgtttatccaaaggatcatacgtatcccaaaatttcggagacacgttgaaggtttgtccccatccctgcccttgcaagtagaaaggagtcggatttccctgatcgtccactctggctgcattatcgggagtagcgagcatcatcagcgggttaaagttaccggacttattcgtaccgtccgccgtttcatcacagctgacagccataatcacttccgaattgaagttattggcatttttaaattgctcgatataaggattatcccctttcttgaaaagactataccgccccttcaactcattatacatatcaattgctttctgataataaccagacatataatagccttcattcaagcaatgccgcatgatgcatacacgtgcatagtctttattgtaacgtccctgttccggctgtgtatctgcaatatactgataagcataatcaaaatcagccataatccactccgtcatttgctgcaatgtcggacgtaccagattttccagctttgaaggattaatcagatcgtccggatcgacaatcaaaggaacaggaccatatacatgcaataaataatacatcatcaatccccgacaaagacgggcctcggcaataaactcccttttacgctcttcggagaccacttcggtagaagccttctccaaagttccaatcacattggtgaagtaggaaatctcacttactttcggaaagtggttcggcctttcatcacttaacgtactgcttgtgtaataaacacactgactgaaatcggctttagaaaggaaataatatccgcctccccaaccattattccacacagccacctcatctgtcggataatcaaagaacttcagtacacctccggcagggatataccaaccgtgctgattgccacttgttccggcaccgatccaataggtccatgttgtcgtaaaaggcatatagcaggtcatcataaatgattcgtattcggcttcagtcaccggataattagaaacattcaacgtgccatacatcttcggatcaaaattatcctcacaactgcacatgataaatgcaatcatgacaaacaccttaaataatttattcttattcatattttcaatcttttctttcgttacaggttttcttagaaacatatttttgctccgaaggagtatgttctcgtcatcggatactctgctttggagccgtcgccacccgtctttatttcaggatcgacacctacaaacttggtaaaagtaaacggattctgacagtcgataaaaactctgatagaactcacataatcacccactcttcccagcttctttcctgaaaggttgtatcctaaagtgatattcctgacacgtacgaacgaagcattctgataatcttcctcaaagcctacgttaccaggtaaagcgacagcctttgttgaagcaataccacgccggtttccattctgattggtttgggaattccagatagtatatacatatttgttcgaattcttgggactcgtgtaatacacatctccgacaagtgcccaacgatatgcatagttatagcgtgtacgtccgaattgtccatacataaatacatccagatcaaaatctttgtatacaaatgtatttccaaagcctatgtgaatttttggaagtgtattccgcatctttacatcatcaatcgttattttattatccccatttgcatccttaataatcggataaccgggctgttgcgcatctgccggcaaagatttctgcgattcgggcatattgcttttatctatgttgataacgccttccgtttcatagtaataataagcattcaccggttcgttcttacggattcgatattcttcataataatagttgggcatccgttctttccaaacggcattatgatgtgataaggtcaattgtgaggtccacttaaacacacgggggatttcaaagtttagtgagttgatagtcgcatcccatccgtaacgtacataatgtccataattcatcgggacggaagatgtcatactaagcggagaggcagagtcatatcccagcaagttggttacatcattgcggaacatatcaaaactcccccagattctatctttcaggactgaaaagtctatacctatatttttcatggtagtcttttcccaggtaacattcgggtaatcaggaccgctaagcagatagggcacataagtcactgaattgttagagaacttgatatattgggctgccagactgaaagtgccataaagcgaactacccagattatcattaccagtctgtccataactaccacgaatcttcaactggtcaatccatgatatatgcttcataaacggctcgttagataatttccaggccaatgacactgaagggaaataggcatatttctttcccggaaaaaacttatccgttccatcgcgacgaatagtagcggcaactacatatctgtcgagcacatccacacttgccctggcaaattgagaacgacgttcgtcggctgctctgaaagaagtcgggtagaaagcgccttccgcagcttccaccttatcagctgcaatgtgatcgttaatctgttcgtagtcaagttcaagtccatttgaatcgttcgtatatcttcccataccgactacggcatcgacacgtaacaaatctccaaactgctttttgaaagtcaacgtgccttccatagtttggtttctacgttcaacatatcccaaatgccctcttgatttatacatgtccataaaatatatatcagaaggaatatacagattacgattagcattctccttattaatgccatacatcaaacggaaggacaacatatccttgattatatctacatcggcagcaaagtttagataataaccgcttgttttagtccggtcactaacttttatcatttcggccgggttagggtaatttgaatataaggtaggttttccgtcctcacctctgatcggtaaataagaaggataagtcaatgctgattgtatggcatcgtacccatttccacccccaccgccaccggaagttgaatttgtatatttattttcatttacattgacaattgctgtcaacttaagaaatggaagcaattgtgaagaaatgtttgtccgaagagcataacgttccatagcggagttttctaccgtaccttcctgtttgtaataatttccggacagataatatttcagcagtttagaaccacccgtaattgtgatattatgattattgatgctaccatcctttaatacacaatccagccagtctgttgtttgagcggcagctatctgttgaggtgagaattgaggtacccatttattatcaaaaggtttatcaccataaggatacataccattcgtaaataaatagttttctttattgaaaatgttggcaacattcatatattcttccccactcaaaggttccagatacggatagtttttcacgatagaataatttccttcataagtgatttggggacgagtttcagtacctttctttgtagtgatcaatacgaccccattggctgcaccaattccataaatggaggcagatgcatcctttaacacttcgatagattcaatatcggcaggattaagtccggccaatcccgaacgattgatagagttgggcataacctgatttccatttccaacctctaaagaagtggaaggcatcattactccatctactataaaaatgggagtacctgccccacgaattgaaaggtcaactgctccacccggttgcgggcttgtcaacgtagcttccagtccggcagcccgcccaagcagcatctgtgacatattacttgttgcggctcgcgatattttttccgtttttaccgttgcaatggaagtggtcagattcttacgggtggtcgttccataccctaccacaacaacttcatccaactgtttcgaagcctctttcatcgtcacattcaacgtcatcggtcgggtaattttctgcgtatatgtagtgtaacctattgaagtaaatttcagtgtcgagccttccggaacttgcaactggtaattgccatctataccggttatagttccttgagtagccccttctatcatcacagtcactcccggaagagcctcgccggattcgtccactacctttccggtcactttgaccggctgtttgttatcctgtggttgagatgaaactttgtttaatacaatctgacgtttttcaatcgtataagatactccttcgcctttaaaaagtttatccagtaccagagtcatccgttcatttttcacagtaatgcttactatacgacttacatcaacaatgtctttgttgtataagaaacgatattctgtctgattttcgatactagtcaagacctcctctacagtcacattcttcagtcgcaatgtaattttggcggattgtgccaagataggtatactgatagcttgcaaagctatacaaaacaaccatatagcacagattctccccatttttacatttgcaggtacattaattctctttttcatttttctaattgaaataagtttcatacctttacatgtttggttattggttctacaaataagttgattaacgaataactgaatctttggaaaggaaggtgagtcagaccttcctttttttatcagttgtcggaagctgaattcactgattatgtctttctcatggcttgtattatttaaaggttaataaatgtgtttttctctcgtttctatcaataagacgtttctaaaaataaaagccacattggatatcacattattttttcatctgcattattttttcttcaaactatcgtttatcccaaataatctttctatttttacccccgacaatagaacctttactacaatactatgccgaatatccaacaacagacttccgacgaccgttttctggtaatagcactgaaacaggatgataaacaggcttttacccgattattccatacttattataaagatttggtattgtttggtggtacctacatcccggaaaaatctacttgtgaagatattgtgcaaaatatctttctcaaactatggaatgaccggaagtcattggaaatagagaactcactaaagtcatatttactgaaagctgttcgaaactactgcctggatgaattgcgccatcgcaggattatagatgagcacgttgcttatgaacttaaatcgggctctatagatatagatacgacagaaaactacatactgtattctgatttatgccggcaacttaaaaatgcattggaacaattacctcctcaagaaagagaagtgttcgagatgagccgattagaaaatattaaatatcaggaaattgccaatcgcctgaatatctctgtcagaacggtagaagtacgtatcagcaaagcgttgaagcagcttcgcatcttattaaaagatttttatttactactttttttctttcttttccactaatggatgtgggattttctttctgaaacgtctattatatataaggtaaaatgcatatgataaataaagattcagacatagaaattataatctccagatatctctcgaaagagtctacagcagaagacattaagatactggatgattggatatcagctactcccgaaaattataaaagctttctggcacaaaagaatatatgggagatcagtcacccggcctttaatccggaagagatagatgtggacagtgcgcacagaaaagtaatggagcagattctccatcaaaaccggccgccggtttccgttcgtcctaagttgtccttcctgcactattggcagcaagtggcagctatcttacttcttcctttactgatattatctgcttatctttattttaaacccgcttctcaaattgcagagacttatcaggagttattcactccttatggcacttggtcggtagttaatctgcctgacggttctaaagtttggctaaacgccggaagttctttaaagtatccgactcaattcagtgataagcaaagagttgtttcgatgcagggtgaagcctattttgaagtagaatccgataaagagcaccccttcatcgtaaaaaccaaacaactgactgtagaagctaccggcactgcattcaatgtgaacgcatacgctccggatcatgtagcagcagtgacgttagtaaaaggaaaggtcgcagtcactcttgaccagaaaaagacgatttccctttcaccgggagagaagattgactataatctaggcactgctctatataacgtcaataagaccaatacttataaatggtgctcatggaaagatggaatactcatttttagagatgacccgctggaatatgtattcaagcgtttgggacagacttataacgtggaatttattctgaaagacgccgaactaggaaagtattcctataaagcgacttttgaaggtgaatctttaaatgagattttgcgcttgcttgaaatgagtgcacctattcgctgtaaagaggttagtaatcgcaacaccaataatgagaagtttgaaaaacaacgtatagaggtgagcaggactatgcaataaaggtagtttcagtctgtgtaaaacgccgtttccgtatgctctgacaagggataattctcattcctatgagaaaaaatactcataggaatgagaaaaaattctcactgcgatgagtattttttctcatcgcagtgagaatgcttgagaatttattacttcatcttatacaccagtgtaccaccttttacaatatcctcatgcgagatcgttttctttgtatatggttcgccattcaatgtaatactatctacatatttatgttctttcgacaaattctccgcaataattgtgaaagtcttgccatcggccaaatgcaaggtcatcttcggcaactgtggagcaccgaatacatattccgcacttaccggatctaccggatagaatcccatcgcactaagcatataccaagcagacatctgtccgcaatcatcatttccgcaaagtccgtcgggtttgtttttatattgagtatcaaatatttcacgaaccaattcctgtgtacgttccggacgaccagccagtgcatacaaataagtaacatgatggcttggctcatttccatgagcatattgcccgattaatccagtaacatccgccaaactttcaccttctagcttaaccgtaaacaatgagtctaatttattcaagaaagttttttctcccccaaacaactggattaatcctggaacatcatgttgtacatgccaagtatattgccatgcatttccttccgtataatctccaccgacactttcagaatgtgccaatgcacttggattaaacggagctttccaagttccgtcagctttgcgcggacgcatgaacttcgtctccggatcgaaaagattcttataatagtcagcacgtttcgcaaaataagcggcatcttcctctttacccatacgacgtgccatatcggcagcagcataatcatcatatacagattctaaagtggaagatacagattctgcttttatcagatctgtcgggaaataaccatatttcgtataaacctcccaatcagacttcaacggatgagatacagtctgcgtcttctttattatattgaaagcacgttcagcgtcaaagccacggaatcctttgcgataagcctcggcaatgactgatacgccatgattaccaatcatacagaaattctcttttccccacaatccccaaataggcaggaagccttgcacttcaccctgttcgatgagagaattcacaaaaccgtccacacgttcgggaatcaccaatgtataaaatggatgagcggcacggtaagtatcccacaaagagaatgtagaatagaaagcaccagttccggcttttacaatagagtcggcggcattacgatacataccatctacgtccgaaatttgattaggctgaatcaatgcgtggtagaaacaagtatagaaatttgtcttttcatcatcggtaccctctatttcaatacggctcaaatagttattccattcattgtgggcggtagctcttactccttcaaaatcccaggcaggaatttctgcttccagattctttttagccccgtctatgctggtggtggaaagagccactttcatcatcagctcgtctcccggctgcatgtcaaaagaggcaatgatgcgttttcctttttctgtttcgcccatcggaagataaagtgaatcgactaccggacggttgaatttcatcacaaagaaataatcttgattgacccataccgtgttattgacatgtcctgtcagtgtttgatcatcttcccagttcacttcacaactgttgacttgtgaatgatattgttcttctctccatgcagggccatgttgtaagtcaatcaatatagaggcagaatcagccttgtgataagtatagcggtgaagggcagcatggatagaggcagtcagttccgcttttacctgtggatcagagagctctgcagtgtaatatcccggagtagccgcttctttatctttagggaaatgactgcgataagcatcccatgcacgtacacgtgtaccggtgaccggcatcaccagaatatcgcctaaatccatacagcctgtgccattcaaatgtgtctgtgtaaatccccaaaccagagaatcctcataaacatattcagaacagtaacgccaaccgactgcacccgtcacaggactggtctgtatcataccgaaaggataacatgcgccgggaaatgtatgcccgttgtctgcgccaccgataaaggtattaacgtattgagtataatcctttgtatccgtcttttcagccggagtacaagaagaataaaaaaacaagcctgctgccagagttgcagccataaaaggggtttttcttctcatggtaaatataataatgttaagttaatgtcgcattatatatgctgatatttatctaatttttcacgatagtagctttctacatctttccagtggtaataaggagctacgtctgttttcaccggtagtttagcttccttttcattaagtaatacttttaccaatacatcgttacttccttttttatggaaaaagacgaattgcacgttactagccatcgggaaaatatcatacgctctccattgttcggataacttttctacgtcagggtaagattctccataatgattcagttccaataaagcgactaacggtaacagacaagactcatgaccaaatcttaaagtggcctggttcttaccttctttcaaagcagcatctgccctatctaaaatattacgcaacaagtcggcttcccgatagggcatcaaaccatccgttacaggagaacaagcgtgtgtcagataccaatataagttgttacaactccatagatcataacactcttcatccgtgaaaagagaatatagctgcatatctgtatcatgactctgcatattacaagccaaatcaaaaagacgtctcatcaggcgcgcttcatcaacgtttgcttttacatacgcttcgtctgtaaacaatgttttcatcaaccgttgcggacgtacatgggtagcttcaaaatctttctgaaccttcttcactttatcggaactagctattttactcaaatccttagcaggaggattcatgtaatacatatcatggtaacttgcatcattcttgatacatagattaggattcatcgcctgcaattggaggcattcggatgtcatggataatatacaccggatgacaactgtggaacgggcatccacttctgttccatccgcaaatatctgtgggaaattagtatacatacgctttgcaattcctctgtgttggcgtgctcccaccgaagtcagttcaccaagacgaccttccgccatatcagccatgcgcaaaacaatatccagtgtgtttttacctgttgcagtaagtttgtttaaagagtcggcttttaataaagtttgcttggggaaacgataatcattcggatcaatcaaataccgtgaaccatgacgcatatatgtgctgatataaaaaggttcgtaccccttaggagcagctgtctgcttggcagtaggcgtgggatatgcataataattattagcggataaataccggtttgcacggatctcttcacgagcagtttgcgcttgtaccgtccatacaaacaaaagcaataaaaggatagatgtgagttttttcatgatagtattattcaatgtattaatagttgtgccacaaaattagagatttcttctcatttaaaaggatttgatacagacaaatatacttaaatcttaaatggaggaagttcctatttatgtggattcgctgtgataaaacaaaaattcgtacgacttattgaataaatatcaactcaattatttatctttgttagcttaataacaagctggcgcaaaaaacaataagtataatgaaagatttcttgaaatttacacttgccacggtgacaggtatcattttgtcaagtattgtattatttataatcagcatggtaacgttgtttggcatcatgtctgcttcggacacggaaacaatcgtaaaaaagaattctgtaatgatgctcgacttaaacggaacgttggttgaacgtacgcaagaagatccgctgggtattttatcacagttgttgggtgacggatctaacacgtacggactggacgatattctttcttccatccagaaggctaaagaaaacgaaaatattaaagggatttatctacaggcaaactcattaggcacctcctatgcttctttgcaggaaatccgcaacgcactgctcgacttcaaagaaagtggaaaattcgttattgcttatgcagactcctatacgcagggactttattatctttccagtgcagccgataaggtgttgctcaatcccaaaggaatgattgaatggcggggtatcgcctctgctcccctgttctacaaagatttgctgcaaaaaataggagttgagatgcaggtgttcaaggtgggaacttacaaatctgccgtagagccgtttattgctacggaaatgagtcctgccaaccgcgaacaggttaccacatttatcacttctatctgggggcaggttacggaagaggtatctacttcacgtaatatttctgtagactcactgaatgtttatgcagatcgtatgctcatgttctatccggcagaagagagtgtaaaatgcggattggctgatacattgatttaccgcaatgatgtgcgcaattatcttaagaaattggttgagatcaatgaagatgataatcttcctatattaggattgggcgacatgatgaacgtaaggaaaaatgtgccgaaagataaaagcggtaatatcgtagctgtttattatgcatccggtgaaattacagactatccgagctctgcaacttccgaagatgggattgtcggttcgaaagtcattcgtgacctgcgcaaattgaaagataatgatgatgtgaaagctgttgtactccgtgtcaattctccaggtggaagtgctttcgcctcggaacaaatctggcatgctgtgaaagagctgaaaacaaagaaaccggtcattgtctctatgggtgattatgctgcgtcaggaggttactatatctcttgcgttgccgatacgattgttgcagagcctactaccctgaccggttctatcggaatcttcggtatgattcctaatgtgaaaggattgactgacaaaatcggcttaagttatgatgtcgtaaaaacgaataaatacgctgatttcggaaatatcatgcgtccgtttaacgaggatgagaaatcattgcttcaaatgatgataactgaaggatatgatacctttgtaactcgttgtgccgaaggacgtcacatgacgaaggaagctatcgagaagattgccgaaggacgtgtatggactggggaaactgctaaagaactgggattagtagacgaattaggtggcattgacaaggcactggatattgctgttgcaaaagccggtatcgaaggctataccgttgtgtcttatcctgagaaacaagatttcctgtcttccctgcttgatacgaaaccgacgaattatgtagaatcacaattactgaaaagtaaattaggcgagtactaccagcaattcggcttactgaaaaatctgcaagaacaatccatgattcaggcacgtattccgttcgaactgaatataaaataaaccgtaatacatggacgaacactttatcaagatacataagtggctctaccctgcctcctggctctacggagcagtggtaatgatgagaaataaactctttgactgggaagttcttcaatcaaagagttttgacatacctatcatcagcgtgggtaatctcgctgtaggagggacaggaaaaactccacacactgaatatctgataaagtttctttgtaatcaatataaggtagctgtattaagccggggatataaacggcacacgaaaggttatgtattggcaactccggaaagtacggcaagaagcattggcgacgaaccttaccagatgcatcaaaaattcccgtctgtcacagtagctgtcgatgaaaagcgttgtcatggcatagaaaagttgcttgcactgcaaaagccttcaatagatgttatcctattggacgatgctttccagcaccgatacgtcaaaccgggattgagtattctgttaacggattatcaccgattattctgtgatgacactttgctccccgcaggacggcttcgtgaaccaattagcggcaagaatcgggcgcaaatcgttattgtcaccaaatgcccgcaagacatcaagcctattgattataacattatcacgaaacggctgaacctttatccatatcaacagttattcttctcatcgttccggtatggtaacctgcaaccagtgttccctaccatgtctccggacacaaatgcaatttcgacaaaccatgaggttgctttgtcctcactgacaaacactgatatattattgatgacgggaattgcctcacctgcccctattctcgaaagactggaaggttgtaccaaacaaatagatttactatcgtttgacgatcaccacaatttcactcatcgggatatacagcttatcaaagaacggtttcataaactgaaaggagaacaccggttgattattaccaccgagaaagatgcaacacgcctgattaaccatccggctttggacaaggaattgaaaccatttatctacgccttgcctattgaaattgaaatattacaaaatcaacaagataaatttaaccaacatattattgactatgttagagaaaatacaagaaaccgcagcttatctgaaaggtaagatgcataccagtccggaaactgctattatactaggcaccgggcttggcagtttggcaaacgaaatcaccgagaagtatgaaataaagtattcggatatccccaacttcccggtatctaccgtcgaaggtcatagcggtaagctgattttcggcaaactaggcaataaggatatcatggctatgcagggacgcttccactattacgagggttattcgatgaaagaagtaactttccctgtacgtgtcatgcgtgaattaggtatcaaaaccttgtttgtatccaatgccagtggcggtacaaatgcagatttcgaaatcggtgacctgatgattatcactgaccatatcaactatttccccgaacatccgcttcgcggaaaaaatatcccttacggacctcgcttcccggacatgagcgaagcatactgcaaggaattgattagtaaggctgacgagattgccaaagaaaaaggaattaaagtacaacacggagtgtatattggtacgcaaggtcctactttcgaaactcctgccgaatataaattattccatatccttggtgctgatgcagttggtatgtctaccgttccggaagttatcgtagccaaccattgtggtatcaaagtttttggtatttccgtcattaccgacttaggagtagaaggaaaaatcgtagaagtaacacacgaagaagttcagaaagccgctgacgctgctcaaccgaaaatgaccacgatcatgcgcgaacttatcaaccgtgcctaaacaatcatcccgatttatgagaactgaaatagcatctctcggtgagtttggtctgattgaccgcctcaccgagggaatcaaactggaaaacgaatccagcaaatatggagtgggcgacgatgccgccgttctctcctacccttcagaaaagcaagtactggtaacaaccgacctgcttatggaaggtgtgcattttgacctgacttatgttcccttgaagcatttgggatataaatcagcagtagttaatttctccgatatttatgccatgaacggtactccccggcagattacggtatctcttggtctttccaagcgtttcagcgtggaagatatggacgaactttattccggtatccgtctggcttgccagcaatataatgtcgacattgtgggaggcgataccacttcttccttgacaggccttgctatcagcatcacctgtattggcgatgccgacaaggataaagtagtttaccgtaatggcgccaaagacactgacctgatctgcgtcagcggcgacttgggggcagcctatatgggtttacaactcttggaacgtgaaaaagtcgtattgcaaggtgataaagatgtccaaccggatttctccggcaaagagtatttattagaacgccaattgaaaccggaagcgcgcaaagatatcattgagaaattggcagccgccaatattgtccctacttctatgatggacatttccgacggcctgtcatcagaactgatgcatatctgcaaacaaagcaatgctggttgccgcgtttacgaggagcatatcccaatcgattatcagacagctgttatggccgaagagtttaacatgaatcttacgacttgtgccttgaatggtggagaagattatgaactactctttactgtttccatcgccgatcatgagaaaatttcacaaatggaaggagttcgtctcatcggacatattaccaaacccgaacttggctgtgcattgattacccgtgatggacaagaattcgaactaaaagcacagggatggaatccattaaaagaagataagcaatagatttcatcacatacctgaaatattttttatcttatacaacactgataataagccgactaactttttatcagtgttttttatttccagaagacttgcagaatccaaaagtttcactacctttgcaaccgcaaaagagatattaccggaccgaacaagcacgaggtgccatagctcagttggtagagcaaaggactgaaaatccttgtgtccccggttcgattcctggtggcaccaccaaagaaagtacataaatgcttttcacacatgaaaacccttgaattagagatagttcaagggttctttttttaccctcactacgcattccgctacatatttgtgaagttggatttcgccaattcagtggctttttttaaggcttttgaaaaagccataaatacgcaccatacttcattgtttttcagctgtttgacaattccaatctccggtgtgaaaaagtaattttgcacacatgaccggatgaagtcgaaaaagtgaaagaaatttaaaaattcggtatttcccatcgggataaaaaaaaggaatcgaacccgggatacaaaaggcaattcgaacctgagaaaaatgggatttttatggcttttccacaagtccctcaaaaaaaccaccgaatttaacatttcgctccacgtcctcatgccatccggttttgacgaaacaattgaatgtaacacctcaaaaaacaaaagtgatgaaacaaggaacaatgaacattctgtttttcgtgcttaaaacgaaattgttgaaaaacggtgaggcaccggtattgatgcggataaccatcaatggagactatgacgatgtacgtatccaaagaagcgtacccctgaacttatggaacgccgccaaaggatgcagtaaaggcagggacagggcatcagtggcactgaacgcctatattgccgaactgcacgcacgcgccttggaaaaacacaaggaactggtattggaacaggccctgattaccccaaaactgattcttaaacgtgttttcgggaaagacaccgaaatgcgtacactgctcggcaccatgagggaaggcatcaaggaaatggaaatactggcgggtatagactactctcccgtcacgatcaaccggtataagaacgtggtgaagaaattacagctgctcatcccctcttattacggaaaggaggatgtcactttccatgagctgacaccggagttcatccgtgcgtttgacatctacctgaaaacggaggcgggactgtgccggaacacgatagtccgttatatgaaatgcttcaagaaatttaccaatatggcattggcaaaggaatggatgcgcaagaatcccttttacggttacaagatggagcaggacgagaccgatccggtattcctgacctatgacgagttgcagaccgtaatgaaaaagaaattcaccattccacggcttgaactggtcagggatgtctttgtcttcgcgtgtttcaccggtctggcattctccgatgttgccagtctgaacaaagagaatctggtacaggacaatctcggagactggtggataagaaaaggaagggtcaaattggaacaccgtaggaaggcttcttccatcagcaatattccattgctgcccgtacccctggccatattggagaaatacaaggaacatccgacctgcattaagaaaggatgctgtttgcccgtcatgtgcaaccagaagatgaacagctatctcaaggaaatagccgatttctgcggcattaagaagaatctgaccacgcacgttgcccgtcacactttcgggactacggtcacgcttgccaacaatgtgcctcttcaagatgtttccgtcatgctcggccatgcctccacacgtatgacacagcattatgcacgggtcatgaacagcagcctgaaagaagcaatgaacaacgtgaaggagcgtcttgcacaataagtatacaaattcagtcattaagccgtccccctagggatggctttttttgtaatctataattcacaatatcctgccgtcctttcaatttcttacctgcaaatatagccatttgtcgggttgattgcgcaaggcggcccctttcaggggctggttggctaaaagaaaatcatcctcgcttcgctgcggtattttcttttgccaagccttgctcaatccccgacaaaagacagccaggcaagtaagaaaacgaaaatccggctccatggagccgatcatgtcaaacttaaaaaaataaaggtatgaacagaaagacgacaagcaaaggacagcaggaagccaatccggaaatgacgatgttggtttatcgggaaatgagctatcctgcacgggaagtgcaaggcaaagatgggaactatctggtttccgtagaaagactggaacaggaactgctggatggcatcagaagccttgatccgacagcattcgatttggacgaagaaatcgcttactattgttcggacgaagagatccgcctgttgacggacgatgaactggaagaaatgatttacggctgacatttaaaaaagtaatgattatgaatgaaacaacagcaaaggtctgcgaagagcaagtagcagaccttaccatagagaatgcacacagggtcacgatgatccggaaaaaaggtacggactatccccccgtaccgttccatttcagaaaggagcatcatggaacgggcaactatgtacacctgtacggaaatccggaagatcacaatgaattgcattccaaggacttcaaagactgggaagccgtagcattcaaacatcctgcctatttggatgatatgtggaaacaggcttgcgacgcatacgcctggagttccttcaatccggagattcgcggcgagacggacatcatgatttacggagaggggctgcacaacgacctgcaactcatgccggaagaggaacgggatacatacatcgccgcctaccggcagaagttgtccgcccagctctcggtcctctcccgctgtgccaacccgatggtgacgggacggagcggatttgattactacaggcaggaaaaaacgaacagaagctatcagaaccgttacgaagaattccgcaattggcggaaaaaagttcttgaaaccgtcagacggaaaaaggaagccgcacgaccggaggaagagaaacaggaaaaggcatggcagacgctcaaacgcgacatcaagagcagtgccgataccatccacgggattgataccggacaatgccggggctatagccgtgccctgtttgtcagcagcatcctgaacaaggtatccactttggccaatcacggggaagtggaaatcgtccgtagggccgtggacttcatttccgaatataacgcaagggtgaagaaacccgtcatcacaccgagaaacaaattcttccaattgccggaactggcggaacggatgcgcgaaaagctgaaagcgatgcaaagccgggaaaacaaggaagtgccgttcgagggcgggacacttgtatggaactatggggaagaccgccttcagatcctgtttgacaggattcctgaagacagcagacgaaaggaactgaaatcctccggattccgctggtcacccaaaaacaaggcatggcaacggcagctcacctccaatgccctcagtgccgccaaaagagtgttgaaccttcaaaacatctgaaccatgaataacgacaaactgaaattcgtagtcgattcacgcagttttgacggcagctgcgtgaccaccatgtctgacggaatacacggcgactaccaccatgagacactggaggaactgagagacagggaaaagaacccgtgtctcacagccgtgtccggaaataccgtccgcaaaatgatacgcatccacctgcaatccctctgcgccccgttcagtgagattacggaagaaagatatttcgactacatggatgtcttgccccccatccgccatacccggaatttctttttcctgggagagccttatcatgcggacatctaccggttctgtttccgggcgggcggacgctacttcacgggactccgctccgttaccacgccaaggaaggagctggaacggcagatggacaaccattaccggaacattaccttcaaaggagacatccagaaagaaaagccgatggtcatctccggccacgcacggcatgcctctataattatagttccttatctgtttcttgacataaatggcgagaaaaagttcatctgcaacctgatgagaggaacggacgaatcgtcaggcagggatgtgaggctggaaaccgccaaaatcctgcgaagcctgcgccgtcatcatttcctctacttctccggctatgagggaaacgacgatatggacaggttcctaggcgaagtgatgaagaaaaagcacaccctgctggcaaacggcaacttcttccaatatcccgtgaaccgggagtccgtgtcgtttaccggaacggtcagggaaacaggcgagccgttcttcttccggatttacgacagggagctgttcctacacctgttgtacgtcctgagaggcatcaaaagggaaaaagctaaaatataacgtgacacataacgacggtatggtgactgtctttccgatccgtcaccatactaaaaaaacaatgagatcatgagaactgtgaccgaagaatcgttgcgacgcaggttggcccgtctggagtcggccttggaaagcgaaaaggcacgcctgagaaaagtatgcggcggcatcccctggggagccgggatgaggcgtaccaaatgtaccccctcattccgaagggaggacgaactgatcgggaaaatcaaggcggtgagacagcaactctcccaaatgtccgcaggcggtgacaatcacacgtttaaagaaacaagcaggtgaattccgaccaattaacttgcaagtcaataattttaaaaccagttacgaatatgaacacccgattggctataatccgttcagagggaaaagaacatctctgttaccgggaagaggaatgttttgtcgatgtatcctatccgatggtgacatttaccaaaggggaggatgattttgaaattatcaaatgcgaccatccgtccatggaagagactttcctgtatcaggaaagccgtctctcaatcgtgattgaaatataccataacggctggccggcattgtctctgaaagatcccgtgacccatgagatatacacggtcctgacggttaacctggaagataaggcggcattctcactgcctgacagggcattcgtggacatcaacaacaatcctgatgccatggagttccttctgtccaacaaattggctgaggatacaggctataaacgtcagagcggctgggtaagctacccgatggtcacacttaaccttccgacgttttacaggcttgacccacatgtctttagcgcaatattgaatatccggtaatccttccgggcaatgaatctggtatcaacaatcaaatggaaagaatcatgaaaagatatgacataagagtaaggtattccttcgagggcacttacacggtagcggcagaagaccgcgatgaagcaaaaagaatggtaaatgacgattgcggtcttgttttgggcggcgatatccacacgacacgcgatgacgatgaagtgttggagtgggatttctgtatccatcccgacacgcggattctctccttgcaggaaagaggcggaaaaggaagtttaccgtcagaagccgttgatttcagcggcaggatcaaggaactgcggggggacatcatcgacgcgatacggcagttgctccatgctcactgcatgaaagaaattcgtcttccggaagaggattatgatccggtctgggtgatatggtttggcaagaacggagaaccatatgaatgcagggtgacaggactccgggtaacggcggacagcctgaccgtccttgccgaagagaaagaaagcggtgacgaggtgcagtgtcacagcccgtttgaactcggcgcaaagaacatagactggcttcatgagatgtatgaggctgtgtggcatcaactgagagaaacaaacaatgtagaatcacaaatagaagaaccatgaaatatcaagcggaaaataccgtctccagtttcttctactacatgtggaacgcctggagcgaggaggaatgcaaagccgtgtatggcggcatgtacccgcatttctgggaaaaatggtgcgtggcgacagacaagggcacattcggcgcggcggaacggttctacctggaactctcggaagacaaccgcaggattctggtggaacgggccgtctcgatatatgacggacgaggcctcagaaacaggaacagaaacataaaaaatcaaacagcatgcagggaaacattatcagtctgatctgcaactcatgcggttgcggtcaaacggaagcacaggaatacctggactccgaaatacggtacctgcgcgaattgcaggaggcggacgacctgagagaagatgacatggaaacggcctgtctcaacctcggttttgagcttgactaccgggaatattttatcaaccgcctcgcaggggcataaaaaacttatggctatgacttattttcagaacatacactctctggcggacttgaagaaagaataccgccggctggcattggagcaccacccggacaagggtggtgacaccgcaatcatgcaacaggtgaccaccgagtttggaaggctttttgaggcttggaaagaaaaaccggatattccctcgacctcaaccggatatgaatatgactatccgggagccacggcaaaggaatacaccgggtatgtgtataacgaataccgctggaaaggccgcaattacaaggggcagcacgctccggaaatcgtgggactggtacgggcatggctcaaggagacctatccgggatacaagttctctgccagacgggagaattaccactccatccatatccggttgatgaaagcggatttcgaggcgttcaccaaagagtccggaaaagttcaaggcgatgtcaaccaccatcatatccattcagacaaatcattgacggacagggcaaaggatgtaatgatgaatatctgcgatttcgtcatgtcgtacaatttcgatgacagcgcccccatgacggactattttcataccaacttttacctgacgctcggaatcggaagttacaaacagccgtacaaggtggaaccgcccaaactcggcagcaaagacaagccggaggtattcaagcatccggaaggtccggcacacaaggcaatgcgccaggcattgggcaaagcgcgtttcggcatcatcgaaagccggaagtatgccggggaaataattctgggggaagactgtttcggctcacggggcgaagtctatttttggccgaaggaatattcaagcgcaaaaatggcccaaaaacgcatcgacaaactggaggaagccggaataaagtgcgaacccaccggctataacggaggatacatccgcctgctcgggtacacccctgaaatgagaaattccctggaacgggaacgtcaggagtatgccgccgcgtatcaggcatggtactcaaaacagaatttgaaaacaatctgattcagaaattatggatacaaacaatttggacaagtggtggtacggacttccgggaaacaccagacaggctataggaaacgatggaatatgggaaaaactggatatgccgtcccgttcggcgctacaccgatattcccggcttagaatttacggaacggcaaagaacagggatgaggaacgcacgctgctcaatgaaatcgcgtgcggactgggcgaccttgcccttgtccgtaaaaacggcatcgcgttggaggaaatgtgcaacgggaacggggaattttacgatgaataccaggaacagttcaacatattatatgacaattacggacacacaatagaaaatataagctggccggactggatcggacatacaattccgacaaacagggaactgggccgattattggaacatcacggttacaagcgtatggaaatcgataccgacagaagaatcccgaaaactttctatgttttccgtcgtgggttgcacatcaacgcaagcgaggacttgtcttaccacatcgtaccacaacaggacagtttcggactggggcgttttgctgtatgtgctaccaaagacggtgaaagcttccagctgggaactgactgtgcccggctctttttgaggcgcttccttgccttcctgaagggtgaaagaagcgggaaagagattatagatgaaatatgcaacaaccgacaaactgaacgatagtatgaaagcaaaagtattcaagtacaagtctgatgggaataccgtcgtggctccttatatggaactggagccgtacgcggagaatgtatatctctccctgtcgagaaagaacgaatacgggaatgaagacgatgactgtttccatgtggtctgccggattgaaaacgtttatttctctagcgggcagtattcacgccggttcctcaagggagaaggttgcagagaggaagccgccacctattgcaggaactggattgcggatacgcttcaaagtgcggaaagaggagccttcgtcaatttgatctccgtccgcgtgttcgaagctctcggacttgacaccacccccttggtgcaagcccgtgaggaatataaaagaatacaggagcagaaacgcagggagcagaaggagaaagaggcggaagagcgcaaagtgcaggaagagcaacatcagcggctgctcaatgaacagaaacagaaattcctggacggggaacggatcacgggagaaatgttccttgaaatcaccggaagggacggttttgacatccatatcagaaccaaagggacattcaacaggcatgtgaggggcattgacaggaacggaaccgtcagtttccggaaaatcaagggctgccggactccggactttaccggatgccataaggccgtgtccgtctatctggcgttcataacagaaaaagagggcaaataattaaatccggggcggtaacggtctgctccatgcagctgttaccgctaccggcttccggcctcacaattcacggttcagcgccattgccagcggaaacatcaaccggttataggctttaagcttttgcaaattcagtacatatccggcatagggattggtcagatcggtatagaagaatacatcggtaaatcccgcgtgttcctccacgacttcaccctccaacggaatctcctccacattgaaccgctccagaggtagttcttccagacgggtctgttccgcatttcccaacacattgaggttacggttaaacagcacgaatcctttcttcctgtaatccacacgcataccgtacggacgctccacaaggaaagcatccgccgctttctttacatagttttccataatcctgaaattagaaattgcaaaaatacagcatttgtccggcaatggcgaacaaatcaggaagattatctaaggaatccacacaaaatcccacaacaaaaaacaaccgtatattttatttcccaccctgcaaaggtagtcccgtgtcctgtgtacccgtacaaggtcaggcccctgcggggttggctgaaagaaaatcatcctcgcttcgctgcggtattttctttcgccaaaccttgcgggtacggccacgggactgtcaggcaggcgagaaataaaaataccggctcccggagccggacgtgtttaactgataaaaatacaaaagttatgaaaatcctgaatgaagaacatttcgagaacgtaaagcgctatgccgaatccatcggtgacacctcacttcaaaagtgcttggaacggttgaagagttgggaagggaatcctgattatccctgcgaaatctcactctactatgaccatgccccgtactcgttcggcttcacacagcactatcccgacggaaggacaggtatcgtgggaggtctgctctatcatggaatacctgacaggtcgtttgccgtaacattgcagccgttccacggatggcagatacatacctgaaaaacatgaaacttgacaatgaccgaaaagcagacttcagaacagagaatccgaggtctgctttttcatttcttgctgtaaagatagccgttttccgggctgattgtgcaaggcggcccctttcaggggctgggttggctgaaagaaaatcatcctcgcttcgctgcggtattttctttcgccaagccttgccgcaatccccggaaaacagacaggaaagacatcaagaaataaaaatgcctacccatgtaggccgatgttttacttaaaaaagaacagatatggaaacactggattataaccagctgctgcttgtctccctgtggcaatacaaccaccacggggatgaagggctgactcctgcacttttcgaggaaacgttcggaaaggtctatggaggtcactattacgaaaaatggaccggctacttcaatcggaatctctgggacatgattgcctatttcagaagcgagaaggagaacggacagaagttctgcgacatggttgcccgtcaggtcaaattgtatcaacaaaaacgatctcaatatgaagtacggtaatttttatgacctggaaagtctgactctgctcaacaggcatgaagggtgtgcctgctccataaaggaatgtgatgtggagaaggtgaaccggctgatttcaaggatgcgggaggacagggaaagagccggtttaccgactgcaggagacgttgtcacttatatcacccgtggcggtgactattatccgcaggcacacattgaaaggggcgatgaccgggaagttcatatctgccttctcccacagacacctttttgccatgaaaatgaaaagtgtaccggttacaataccgaaggaggcccttgggttacaaccggtccggaattgctgattcccgatggcatacgcagcaaacagttccggatgtgggggcataccggaaggcacaggaacggtgccgtcctcttccacacattcgtcagggcatggaaatacacggaacccgatcctctgtacggaaagtacaccacaaaagaatggaagagatacctcatcgagtgtcagccggatattgaaccggctgatgcctttgtctatcggaatgaggcattcaccctttactcgcgggaagaactggaacggctggtcgggattctgcacggaaagcttttcaacggattccgtcccggtctgttcatactctgggcataccgtatggaatggaaggaacttcccgcatgggaatggaacatgctgaaagcggacacccatctctctttccttggcatttctcccgtcaggatacagactgaccataaaagacatatagtaacaatctataaaaaatcagagtaatatggtaccatacaacacaccgcaggcgatacgtccgcttgagaaaatggtctgtgatttcgcctattcgaacggctacgatccgatatccgttttcaacgatttcctgcgctatgtcattcacgggttctctcccggcgcaccgccccttatggactggaaatacaaacggcagcagaacaggcattttatggaaatgcttaccggatggatacggctcatgcagcgggaattgcaatccggcggatggtttgatgcgttcggtgacctcttcatggcaatatcctccaaaagcggtcggcaggtgaacggacagttcttcactccgccggatatctgcgacctgatggtcttatgtaccgattcgggggagacagcgacaggaaaacgtatctgtgacccgacatgcggaagcggaaggctgctgctggcatatcatgtacgccacctgggtaattatctggttgcagaggatgtcagccgtacctgttgcctgatgaccgtttgcaacatgctcgtacatggctgcataggtgaggtcatccaccatgacagcctctgccccgaaaacttcatggacggctggatggtaaaccatacgctgacccggacgggcattccctccattcgccggatgagtgaggaggaatatcggacaagcaggaacatgtccgttgacctgctcagaaagcggaaagagaaattgcgccaaatgcagcctggcaagaaacaattgccatataaacaacagaatttataaacaataaaccgaatgattatgaaactgaatgttagcaacgaattgaaatcccgcctgacccatgcggcggaaaacggaagtgtgatagccaaagatatcctttcggaagtaaaaaagaatgtaccggtggaagaagtcatacgggggtcctacaattttttctccaccaaacgcaaacggacggaagccggcacgttcaagaaaatccggatcgtgttcacggcatgcaacaaagacttgggccatcccaatttcccggaccggaacaatccgcaggcaccctggtttccggagaaccggacagatctggaaccgtccacgtttatcgagctgttcaaaaatctgggaccgtaccagcccgatgaaatcaactatttctgcagcgccatctcactggacagcaaggtcacaatcagactgcatgacagtatgaacgattttatggaggcttatctggaaagcaactatagtcccatatctgacggtagcgaatccagcctgcacaactcctgtatgagatatgaagacaaggcccgtaatgcagcggatttctatgccaatttcgcaggagccaaaatactcgtggcaagggatgacagcagcaatgtggtcggacgggccattgtatggaacgagataacattgtggaaatcaataaacacaccgattgccgcctccctgctggatcgtatctattcctcacacgcattcgtcgtcgaactgatccgcaagcaggcgcaggaggcaggcatcctgttgcgacgcagatacaacgattatacacatacgacggatttcaccgtactgaatcccattgaggggcaggaatgggcggccggagataatatacaggtctctttgacggtgaaagtgcccgcctgcaggtggcacaagaaaggggtgccttacctcgacacgttctacagccttcatctgacggacggtaacctggaactgagaaatacggagggcgacacgagcatagccacctgccggagcacggaagggtgtgcaaacaggaaaaaatatgtatgtcccaaatgcgggaagatacatatcttcccggatgcggcattctgcaagaactgtcaggatatgtactatgtatctaccgtattcgggaaagtcctgaaaggattatcagtggaatataaaggaaagaaatatccgtcttttctctttcgtaaagggcgtcccgtaccggaattcagacgatacctgcaaatcgaaaaattgttcatttcctaaaatatcattatcatggaaaaactaatggctctttacggcatttcttccccctctggcagagaggggaagatggctaaattcatcatagaggaactcaaaaggatggagattcctttccggcaagacaggtacggaaacatctatgcggtcaaaggcaaccgggaaagctacccctgtgtcgtggcgcacatggatgaggtacaccggcgcaagacaggctcttatgcagcccatcttgtggcggactcgatgattgtcggctatgatcacaagcgtaaacggatgaccggaatcggtgcggatgacaagaacggcatctggatctgcctgaaatgcctggaggattgcaagacggtgaaatgtgccttcttcgtacaggaggaggtgggatgcataggcagcagccatgccgatatgtccttcttttccgattgccgtttcgtgattcagtgtgaccggaaagggaacggggatatggtaacacaaatcaatgggatgaagctctgctccaacgagttcatttcagctatagatgtccggaagtacggctacaagccggcacagggactgaatacagatgtggcggctttgaaaaggaacggtctggaagtatcctgtatcaatctttcctgtggatattacgaacctcatacggacaacgaatataccgtcgtggctgatctttgcaagtgttaccgctttgtccggcatatcatctgctgccacaagggaaccagcatgcatataccggaagcggggaaaaaaactttccccggatattatgaactgttcgggctgaccggatatagcgaagaggattatatccgtttgtcagaagaaaaatacatgggacatgctaaaacaaccaagacaagctctaagaataaattctgattcatcaacattaaaaacatagtattatggaaacaacagtaatgccggcagctgcatcggtacagaagcagcagggcctcaaccaggtagtcattaacaaggtacagcggatgatagaaggcaggcaaggtggtgtcatggacaccattaaccgtctgctcagtgagggacggatcgcgcaggatttcatcgctcccatcggggtaagccaacgtagcaaggaacgccccgttatctctttcaaagcggaaggaagggtacagatggcaatgcccgaagggaacttcaacctgcacggcaacgccataagccagatttcggagaagatgggcattcccgccaaatacctgcgcgagctttccgccggggatgtttggcagaaacagttgtgcgccaccatcctgaacgagcattcgggatggaccgagcgtacacgggtactgatacgggcggtaggaatggaagtccggggcgtattgtcggactcctaccgtcggctgaactcggtggatatactgaccgctttcatccgtgaggcgggaggacagggagcggtcgtgtccgatgcctatatgaacgacacgaaagtatggtgtgaaacaatcctgcccactccgatagagatacccacccgtaagaacggaacggtcatcatcttcgcaggagcacgcttctccacatccgactatggcaacggatcggtcgatatgcggtcgttcctgctcaacggggcgtgcctgaacgggatggtcagggagtccgtcatgcggcagatacaccttggaggccgactgccggaatccctgtccctctcccaaaagacctacgaactggacacgcagaccaccgtatcggctgtttccgacctgaccaaaggactgtacagcaaagacaccatcatgcagaaggccatcgaaattcaaggagcatcggagatagacgtggatttcgacaaggaactgaagaatctggtgcagaaaggagccttgttgaaaaacgagggacgtgaggtcgagaaactgctgatgaacaacaatcctgacgacggagttacaggcggggccacgctatggaaactgacacagggaatcaccgcctttgcaagggaacagcagccagaacgctgccgggaactgcatgaaatttcgggacagctgatgaaccgggtaaagataaattaagagaataacaaccgaattgtatgacaagggcggccgtgagtcgcccgtaaagcagaagaacaatggaaaataatatagtgtgcagcagatgcggatcggccaatgtcaggtgtgaggcaatggtaaaccccaacacaaaagagttcgaccacttcacggacgaagctttttattacgggtggtgcgaaaactgcggattgggagttgccctgaccgacaaggaggaaatccggaacgaaattttggagaaataccacaggttcaagaaagagaatgcttgtgagccacattacgcaaattgccggattgtccaaagggacagcggtcaggtcaaggatgtaagaattatgctttcaccggacaccggtatggccgatgacggtattttcttttactgccacacattggaaagccttattgggctgtccgttcccggcagggaaagtttcacccttacggaatgtttcggttttgccttgctgacagacagggaaaagatggaacggcaggtatttaaacatgaagcggacggaaagcccgttatcgtaacaggcagggaagtgctgcttttctatgggaagcactatggtataagaccggaagaattgaagcaatacgcaacggagtattgctgccatatcaaacattacagggaatatggatatccgttgctggacaggtccctcgtgaaaaaaatgctggaggaagaggaacggattacaaaaggggaaacacggtcattcactctgcggatacactttccttggcatgtgaaaatcacaaaagaggataatcctgaatatgccccatacagatatgccttgaatgcctattgcctggacaatccgcaatgttttaaccgcagatacaccactttggagaaagccttgctccattgtctgaatggattcaatgaaaatgccacaatcaaagaccggtatctttcaataggggaatacttgcttcaaaagtaagaatagcagacaaatacatcttaaaaaaacagaaacgtcacaaggtgatgtatatcacatcatacctgtggcgtttctgtttttagccctttcccattttatgactctgcccgctttgtaaatgtatctaatttgactattcaagtcattttatccaagcagctatttgctcgttatttaacttgaacagggtaagtatatggaattaaattttgattatagtgcactctaaataaaagactatctccttccagaaaagcatcaactaaatcaggattcttgtttttttagttgctgaatactttcaatatgtaatgtgtctttatggttttcgttcatataatcataatatggttgggaaaaatgtccttatttattatttatatgaggtgagtatttacgacaataccctaaataggcttgtctgatttataataactgattaaacattaacgggaataaccttgatagctattcccgttattttcttactcgttttccagtttctccatcatatgctgacagtagttacaataaccgccattatcaagagcttcaagcatttcagaccaaggaatatcacaagcacatctttgacattcctcaacgctgttattcctaatcatcttattaaagacatacttttgtttatcagataaattgtcatatcctttgtccaacatccttttagctataccagcttctttgtcatctaaacgaccagactttatcaagtcctccagaaaaccttcaaaatcttcttcaataaatctttcttctttcatattccaatatttaaaaatctatttttcccagtttaaataacacattacagtccgttatcttttcaacttcagacatacccaagtataaacgagtataatcgggtgcggtaagagcaagtttattaccaatcacttctctaaccaaataagcttttgtcttattccctatggggtaaattcaatccaatatttataccatattttgttcaattttacagtgttaaacgaatccttttcctcctgatactacgaatattaggggacacttttatatgtacaagaggtatgcctatatctctattctgacaaaatgtcactcatatatctttcccaaagttttatatatagaataaagaaaatttgtaagtatgaacagaacaataatttcaattgaagtacaagcccacaatggtaaggaagccactatcattgtcaaaggagaacagaacaatcagattatgtttgaaaagcaattcgagtataaagacgaagaaaagcattctttgcggttacacttactttcagaaaggtttcatcgcaaattgccacaattaggtgatagcttaggcgttttttgtatccgtaaacttttcaatgatataacgatacgaagtaaaagttcacgaaacatcatatcgtctatgctatgcagtatcttcccccaaaccggaaaaggttctgcatgagaaaagaaagcggaacgctgccgatccgtatcaacaagcatcatatccaaaatacaattgctgccattagattccatttctatatatatgtttcctcctaacattcctgttacaggtcttcctttacggtctatattacgggaaaaacagtatttatactttagtagattgcatttgtagccatttatttccaatattatttctgaattcatgacgacttgttttatgcatttgacattacatctcaaacttagcaaaaaatcaagaaagacaatgttcaaagagcattttttatgcaccatatgctcaataacacattttatgtctttcggttacattaaaatacaacacctgttagggatatgttcataccggacaaataaaaaagattcggtcgtctcgtaacaaccaaacctttatcaacaagcaatctacggtatatagaacagttcaaactcctcttttcttcttctctctatgcttggaatgactttcccccgataacagcggaacgatacatattccttgtaaatatcccggttgccgctgtccagtttctgaatcagtttgcttttaggtatcttgccgttgccgatcagacggtaacagcctacattaaagcctaacagacttaaaaggagcgaatctttcccatattttcggaataccttcaaacaccgttcaaggtcgcatctcaaaagtgagtccgcctgtgcctcactcaggttctcggtcagcgtctcgtggggaagcaggcggtgtccgtaaccgatgtaaggcattttcccccggtgccagccttcccaccgcttgatgcaggctaccgccttatctttgtcagacgggggattttccgccttgccgtacaagacaagtaacagaaagatcataacagccggtattcttttcatgcagcctccttgttattttcttcatccgtatcctttccattaaaatcatatgtcaattgttgcagattcccccaattatcttcaagatagaggtctatggtctgggattccttgccgctttgcgaagtatagtaaagacggaatttccattcgttcagcagataacggtcattgggcttcagtaccgttccgtcctccatcttcagactgcccttaccatccggctggaaataccttagcgtatagacggttccggtaaagttcccttccggcttgatttccagccggatttccacagtctccccatcggtaatctcatccgctaccggcatggcttctaccgcaaacgggtattcctgtttgatatccagctcattgtcacaagcgacaagaccaagaaaggagaatgccatacagcaggctgtcagcataaaatcaaggatttttcttttcatgggtatgtattcttttaaggttagaaaatgtattttactccgattccatactggaagtggcagattcccgaggcgctgccccacacgaaacgctcacgcagacgcaccagcaggacaaccctgtcggacaggtatccttccgcttccagcgttaccgcgccgccatagatgaaagactcgcattgctgcaaaacggctccgtcatccagcagccggtctccttcgttcacggtctcatagcccaacagggcggaagcgccgaggttcaggaagaaggacttgccgggggtggaaaagaacgtatggtaataaccgccttcccccgtatattgcgacaagggtatatgcgtactccggtaagggatgttacgtttcagcatctcaccgccaaacatccactggtttctgttcccggtacaggtggatacagccagcgagaaggcatagcctgcatcgtgacggtttgcccggctgtaaaatccgtcggccatttcagtggtgaagcggacggctttcattcccggcaggcggcgttgggcttctgcctgccccgtaaagagggcaagcaggagggtaataaagagggagtttcttttcatggcgttcatctgactttcagttcattgacggtttctgcgcgtaccaggtcctcattctctacatcaaaggactgatgccggccgccttgcttctcatacatttccactatcagcttcttgtcgtcgggaatggtgaacttgggcagggcaaacaccgtccgctcgttcttcttcccgtccacacgggtcacatagttgaaggcacgaagcggatagatgacctgttcctgcatggcggtacgtttcatgattttcttgtccacgatcttgaaggtcacgaagtccacgtcgaaaggcacgttcgtggcgttcttcacttcggtatggaaatagatcagttcgccgtgcgcataaagtcctttaagcagatattgcactccgaaccgtttgcagccgatgtgcttgaccttgcgtttgttctgttcatacacggatttcatgatcagccgtaccagacggggagactccccggcgagttcctgcaagtagatttccatcgcattgttcggacggttcacggcctctccgtcatggatgaagtcgcacatttccacattcagcagcaaaggctcgtcggcatacttgacgttgaatgtatagaagttgccgtcttcggtaattacgctcatgtttgtctcactccggaaatgtttccgggttgccttcacacggatcacattttccgcaccgtccgccttgcccgctatcagattgggcgaacccaggtccacatatctcacgggagagggaaaaataatatgtacggtcttgtcatatgtgatttccagaccgtgtgggggaatcatccggctgaatccgatcttgcggctcagtccttcataataatccccgctgctctgctgcgcgtatgcagccactgtgcccgcaatcagggcaagcatcatcagaatcttcttcatgtgtgtttcttggttgattggtgaataaatggttgatttcctttcctccttcatttttcaggagaatgcagcaacagccggtgtccggccttcagggtgattttcaccgtgcgcatcttcttgcccacatattgtgacataccctgtatcacccccttgcccacatccgaggcaatctgcgctccggcatccgttgagatattgatgctgcttcctatagaggtgcccatgccggcggcaatctcacgtgcggcatcatactccatcgagttcggtacaaggattccctgctgcccgtcagcgtcatacacttcgagttccaccggaaacagcgtgcccctgtactccactgtctcgatcaggattcccatccgttccccctcgacacgtgtaccgccgaccagtaccgtacctttggggataaggagatcgtccactgccatcggctcaagcaggcggatacgcagtgcctgtccgtcagatacggtctgcgtgccatgcacacaggcggcgatggtgttcctgccggaagatggcattttgcctaccggggtgtggaagccggtatttctctcgcctgcatatccggaagcaatgtcttcattgcctgcaggctgggcgagtgatgacaccatccggttctgtacccgttttacaggccggacagccgtccgttctttccggctgtttggggcattggccgtagaggaagcatcaggctctttcccgttgtagcgggcagccagctcgtaggacttttccagcagagccatcttttcttccagggtctggccttccgcctgttcttccgccggcttcctttctttttccagatcctcaatacggcggagcagatcggcatctggctgattttcattccgggtatatacagtgcccagcgaacggttcatattccggtaggcttctgcagaggaacggatggagccgggggctttccccttttccggttccggcggaagttccatgtttgcttttcctgcagtaagaccggcagtatcctgaccgcccttgttgagcagttcggacatctcctggaaggttcccctgcgccatttttccttttttgccagtgcttcctgctcataggcgcttaccttgttgccctccatttccgaatcttccggtgaaggcatctccacgttgaaacccttgcctttttccatttccgccttctccttttccgacggactgaataccagcaggaggaaccccatgcacagcaggcagagaaacggatagacaatatactttgcgcgccggcgcttctcttcgggagtcagcggcttgtcatttgacactccgagccgttccctgattttctgaaagtccattttcatgtttatggatgtttgaatgaatgtttcttgttctttccgaccggaacacgacggaacggatatgtcccattgccggtctttggcccggctccccgaaacgggatacacaggagagaatcgagtacagacaggaggcagcaagcaggaacgagaccgtgcctgccagaaggatgcgctgctttcctgtcagccgccggcagaacagccgtacccggctgtccgcatggccgaagaatccgcgttttcccctcatcgttccgcacttcttatgtccttattctccagcacggtaaactgctcgataatgaatccgttgggattgtcatccgaacgtcctgtgttttgaagcgagcaggaagttacgaggctgcgctcggtcacgttgctttcacggataatcagctgccgggcgtatgtccgcaccttgtaagggtaggcggcaaagtcgcacaccacgctgtccacatgcaccacctggttgatgttgcctgaaatcaggcggttgtaataccctctttcggcaaaatccacatagtagtgataggcactcttgtctgccagttgcagggcacggttgatattgtgctcgatggcatccttctggggtgagagcgagaaaaacagttcgtgaaagcgccttacatgttcccgcgcctcggcaggcctgttctgtgagaggtcctgcgaaagggccatcatcagcgatttgcccccgtcaagcacatagattttctcgcgttgcttctcggcaaagcggtatgagctccacagcgcatatccggtaacgagcgcacagcagcaggcaaagaccgccagcagcaggcggatgcgcttgaagctgctctcaatgtttgtcaatgacttgaattccatttttttgatgtctggtttgaatgaataaatatttccggtatgacgggacatcccgttccgacaagtcaccggacccgtcatcttgggttgcccgactcatgggaaggaggctccgcagggtttatttgcccctcagcctgcctccgatattccccaatacggcaccgcctgctccggctgcaagcccccctgtcttggtggctgtacggttcaggttacggctgaagtttccggcaccgcctgcctgcactatccagcctgctaccgtaggcacggtgaagtatccgataatcccgatcagcataaagatgatgtagacactgttcgagttgtctatcgagtagtccggattgttctgcagttcctgaatgtcattctgaagcatcagtacctgaagcttggcaagcagggtgctgaacaggtcgctgaccggaagccacaggtaaacggaaatatatctcgtgaaccactgtccgagcgtggactggaatccgtcccatacactgaaggcgaacgctaccggtcccagtatcgagagtacgaccaggaaaaaagtcctcacggtgtctatcagcagcgatgccgctgcgaatatcagctccagcaggctgcggaatgcatcccggattttcttttccagattatacatcccgacttccacatacatgcccagccgggaggcggtatctatggttgaccagcccagttcatccagctgacggtcaaactcctcgtcacttaccagatatgctgtttcgggattgcggagcatggcctccttttccagttcctccttttggatccggtactgttccatatccatcgtctgtccttcgagcatcttgtgtgtgccctgcacgatgggactgagaatattgttcagcgtgccgagcaccagcgtgggaaagagcaggatgcagatgcctatggcaaagggacgcagcaggggataaacatctatcggttcggcacgtgccatcgactgccatacacggacggcaacgtagaacaacgcacccagtccggcaagtcccttgcccacgtccatcatgtcctcgcaaaggggaagcatctcgtcatacagggttgccagtatggtgtgcaggttggcaaaatctatcgacaacggcatcatggctaccagtatttggaggtttcattcccatagagccgcatcacacgttccaggtcgttcttctttctggccctgaggtagcttacggctatgttcttgttcgtataatagctcacaaggttgcggtaacggcgcatctcgtaatagcagttgtccaccacgtccatacggtccttgtcggtcatggacagggtactgacattgataacctgtttcagatcctgcaacacgccgttgctctcttccagcaggcgggtgtaaccgaaggcgatggcgtccagttcgcgcggtgagaagttttcatcgttcatcatcttgccgaagttggttacatagatgtcggacacgtcgcccaccatcaggatgatgtcacgcaccttgcgggcatcctgtatcaggttgttgaccgatttcagctggtcgtaatatttcttggcctgctcatagatctttactgtctcggcaaagctttctgccgtattgactgccgtctttgaggtatgggcgatattgtccgacatgtttatgatgctttgggccagattgccgggatctgtcaccacccattgggcgcgtgctccggtaacgcccagtacaaatgccgttccgatcagaagcgttcttgccttcatgcccgttcctccttccttacatagtctccgcccggtgagaatgtcagcacgtcgactgcctcattgtaggacacatcgacacggtagcccgtattgacaaacaggtttccgttttcttccaccagcaggtaagtctgcggcttcagccttcgggttctcccgctacgggaaaacaccgtcaccttatagcattctccttccttgtataccagcacgtcaggtctgccttccacgctggtccacgttccgcagatcttgtcgcggtcgataccgctttccgaacagctctgtaatatcatggcggccatgcttatcagacataccgccagcctcataaggggtctgtttctcataatcgttttcatttcgggtttgatacctgtttctgttcctctcgctttttctccgccagacggcggatggctccttccagactgccctccggtcctccggcaatccgttgtacttccagtttctccgactcctcggtcgtgaacgtgaagtattcttcctcgctcacttccgtggcatatactgccgagcaggttcctccaagccctatccatacttcccggtagaagcgcccgggatggttcgcctggttgatggaaagaatctgccctttctctttctcggtcagaccgagcagccgctggatgtgctcgaacttgttcatgtatttccgctggtcaagcaggatcttgcagtcagagttgttgatgatggcctctttcacaatcggggagctgatgatgtcgtccacctcctgtgtcaccaccacagcctcgccgaaatattttctgacggtcttaaaaaggtacttgatgtattcactcatattggcggacatcagggctttgccgggtaggtcaggggcattactgcccctttcccccctcagaaccgtacgtgaaagtttccaatcatacggctcaagcggtgttaaatttctattcaatagaaaccagctcatagttacatctttttagtttgaatgacttttcttctacaactgtcatgcagcaggaaatttactttcttgccgttgactatttgttgggaagttccccaaggatgtttcttgtctatgggtttaccacatacgggacataaatggttctgtctttcccacatgtacagcaacgattttctaccgttgagtgactgtagcatcttgtaagtcttgcgcttttcaaaatactctgtccattcggggtcaaagggatttgcttcaccttttaccttgacatatcgggtaatctttgtgtcatacagccttttcaatgcaatcctgtcatcagtcttgcctttcttgaagtttgccacgaagcaccagttacggttttttacccgtgtgaagtatcggtcggcaatccaatatttgcctttcttggggtgtcgtctcttggcccattgccataacttttcaaatatcaggtagtcagcttttctgaatgtgtcagaagccacacaattcttatagtagtttacccagcctgttatcacaggattcaagagccttataagtgattcctgcttgcttcctttattggaatcaatgattccccggattttctgcatgaatttcttcaggctctttttggatggtttaattagaagtactcctttgtattttcggatattgtacccaagaaagtcaaatccgtcatcaatgtgtgtaatctttgttttctcttccgacagggttaatcccctttctttgagaaagtccactactaacggtttgatttcttccaaagcttccttgcttctacccgtgatgataaaatcatccgcatagcgtacaagatgtactttgggatagtagatcgttttcctgtttacaaatttcttgtgatacttctctgcaagcatagtttgcagtccgtccagtgttatattcgcaagagttggtgaaatgataccgccctgtggagtaccctcttccgtggggaatagctccttgttgaagacgaaaccgcatttgagccatttccgcagcatcactttatccatagggatattgttcagtagccattcatggctgatgtggtcgaaacaacctttgatgtcaccctccataatccattcgggagaagctttctttgcaaggacacaaaaacattgttcccttgcatctccagtacttctctctttacggaaaccgtaggaattactgtccgcagttgtttccgatactggttccagcgcaagcagatacaaagcctgcattgccctgtctttcatcgttggaatacctaaagggcgtaacttaccattgctctttttgatattgaccctctttaatggctggggtttgtagcctcctcttttcagttcgccgattgccttgaatctggctttgggagttgaccattttaccttgtcaacgcctgcggtgtcactgcctctgtttgatgtaacacgttttacggctaaagccttagcgtaaaacgagtgcgttagcacccactgcaaagcttttactctgccgtgtttgccagccttttgagcttttacaatacgcgcttgtagcttattaaccgccatttcacacttgttccagtctatgctttcccaagtgttccatttccggtcagtagatgcacacgatgtttgaatttcgttcatttgcttttctcctttcataagttccataagtttcttgtaaaacaaccaccatgcggaagtctgcccactttcgtgtgaggtgatgtttcaacctctatccgtcccgttacaggatggcgttcgctttttccacattcctctgcccgcactccattcggcttcacttacggtctgcttacctgctgttacacaggagaagtacgggtttaccatgtttcttgtatatgacaaatgaatgggttagaatccgtctatccgccgacagtctttatatccgtgtaattccatgctggagggaattatctgactgcgtcccttttgggttagagcccagtatcattggcggctcattcgaagttacgacgtttatcaacggttcacattacattattcataccattcagcctagctcccatgccattcgatactaacggcagttgtcatcccctcgcggttcagacttctcctttaggaagggctacgttgttggttctgttgacgcacgagttcattacttaatgtcgcacgttcccataggctactgttgacggaacaacaggtttaatcattctatttccaactcgtggaattgaacgtcaaacaatcatatacaaaacttacatgtcacagccagcattcctctatcaatatcatcttacggatacctttgagcctgcgcatcttggcgatgaaagtttccataatgatcagtgtcaccactggaagaagcactttgttgctgctgatattgtccagttcgaatacgatgaaccgtttgcctgtcaggtccagttccttgtcggagttcagcaggaagtcataatctccgccccggtagaacggttccagaacgttcaaaaaaccgtcaatgtcaaaatccttctcacgcacctttttctcttcaatcattcttctgtagtcatcggcgacaaactcatagaaaccgttgaagtccggtctgatgttccggttctccgaaatctttcggatataggcgttcactgctccggaaagagcgacctcctccgaacgtttcggcgactcgtcctcccgtttccacaaggtcagtatcagcgtgttgatactgtcacgcttctccacatcgaattttccggattcggtgtagaacgggttgaaggatatcggattgtcctcttcatacgtgatgtaaatcccgtccttcccgttggtacggtcatggatcatcctgcacagcccctggtagctgtttccagtgtccaccagcaggatatgcgctccctgttcgtagtattggcggacaaggtggttggtgaaaaaggattttccgctgcccgaaggcccaagaatgaacttatttctgttggtgatgattcctcgcttcatgggcaggtcggaaatatccacatgcaccggtatcccgttctggcggtctgccagccggatgccgaacggactgggcgagctcctgtaattggtctctccggcaaagaggcatacggcctgttccaggaaggtataaaaggattcttcagatggaaagtcgcctgcatttccggggattcccgcccaatagatgaccggtgtgtcaatggtgttataccttggcgtgcattccatcatggccagctggctgcccgtgtcgttcctgatgcggcggaactcttccgcatcctccgcccaggcgatgacgttgcagtggcatctgacgggaagcactcctttggtatgtgcctcatcaagatacatctccgtccactcctggttaatggcattgctccggctgtattttgacaacgagagcatattgcgcgagtttttctccatcatctgcaggatttcctgtgcgtcgtcgatgaacacgtattgcgaatatatgtggttgcatgacagcagcagtcctacgggtgcggcaaaggagaggcggcagtcgctgcggtccgtggacatcctctcgtagcgcatgtccgtggaaagtctgccgggcaggtcttccgtatcggaaagggtatgcaggcagaggcgtttgtcaccgatgcgcatcctgccgggcttgaggcagatgtcctgcaatacggcggtctcatccttcagcgagagggaaaagtatttttccaccagtccgggacgttccttcgtaccggtgatttcgtctgtttccagacggcgaagccttatatgtccggaatcattcataatacgctcgaactgttccaccgcctcaagaaagcgggcggcagcatccttgtcggttatctctttgggcaacaggaatccccggcaaagggtattgaagtcactcttccgacggctgcgttcgcgggttgtcttcgtcaggaacaggtagcatttgtgattcaggtaaggtctttcattgaaatgcagctcatagctgcgtgtcaagaagctctgttctccgtcatcggtcttcggacggtaggtttccttgacgaaccagtcctgtttgcagacgacactatgttccggcaataccttcatggctttgatccaggaggagtgcatggcctcatactcgtctgccgttaccgtgtacagttcgggcagttccacttcgaaagccacggtcaggtctgcatccttgctcacgatacagccgttttctaccgatagcagggggaatctgcgttccagcgtttccgcctttaatacatttctcatgattgttgtttttttcttcttgtgaataatctgaaaactctcttgcggtgaatcagatagcgtggatgtcgtttttcagccagcagcttcatcagcccgtgttcaccgtaacgggcattcaaacggaatatcacccacaccaacaggctgccggacaggattccgaaggataagcatatccattggtccacccccgtcaggtaaagaaagactaccataaggagcaccatcgcaagccctccggcaaagacgaacaggtattgcgacttgagtcctttgaactcgacggggttgccggcacctttgtttaccggatattccataggctttagaggaagaaggaacgtaagatggtggcggctacgatcagaaagatacaggcaaagaaccagctggcggcggttttcgaagtgtcaggatctccgctggaaaatttgccataggtcttgataccgcctaccagaccaagcaccgcaccgatggcatagcatagtttggtggcgggatcgaaatacgaggtcatgaggctggttgcctcgttgatacccgcaaggccctggccctgcgcaaaggtgtttgcggcgatgaccgcacacatcacagaaaaaaggattcttcttttcattgtcgaatcgtttgggtaagacataaatttgaattcgacaacaaagataaatggggataatacgctatgattcagaggtgtcatcagatgtcatcaaatgtcatcagatgtctttgccgtacaacggatgaaaaagaaaaaacaggtttcctccactttggaagaatgcctgttgcatgttttcgttaaatgggtacatcatataaaaaatcccatatactttaacgcatacaggattttccgaacatgataaatattgccttttcagactagattcctccagtcagtaacatgtttgctttctttcctctctcttttcaaaggcaacgcattcccttccttatccacatacttccccatcagttcctcaatcagcttcttgttctccacctgggaggagaacagttcaaacatgtccgtttcccggatggaatgcagtgtcatggccgccctgtatgatttgttctcgtccgagccggcgccattcaggttaagcagcacgtcgcctacattgagcaggtcagcaggagtaaccatcggagcaatggcttccgtttcgggagagcggctgtccagttcctcctgttcatctttcagcattctcatctcctccaaaggcagtttgcattccacttcatcttccggaatatccttatccgctccgataaaatcacttccggtttccagttgctggctcatgtaaggggcgacggtcttcccggcattctcgtccagatagacaaagcgggtagctcccatcacatcctgtgcatttcccggttcaccgttgtctttttctgcttgtggccgattgcgaggagtacaaagcagatcacagattttacctattctctctttttgtttccataccttatataacagataagcggtacagccgaaccgtattgataaataaactatttcttccattctattggcttttgagttgcttcttgattatatatttcattgatgatatgctgatacctttccagatggtctgacagtacacttcctaaaaacatggggacagacatttccggtgcaatgaccggcaatactttggcaacagttctgtacaatgtatcgttaatataggtctgccttcttgctcccgacagtttcactttcagaaaccggctccggtattcatctgaatcagccgctccatccggtgctttttttatttgctgtctggaagaaccgcttttcttctcctgtttctccgaacaaggtccagcctgactttttgtttccggctcctcttccggaggaaccgttctttccaaagcggtcacatctcctgccatcatgcgtttcaatgcctcctcatccacttggtaatccgttcttcttttggtagtcataattgtttttattgaagtttcagtatggtttctatttccgctgccagcaggtccagactgcttcctttcattgcggaggaagatggagggaacaaagtgctgcggaacagaggccctttcattccggagtcttttttgtaacgttctgcactgggaatgacggtttccagtaccggcaatttcagcgaacggaaaatttcagtatagccgttatacaggtctttggaaacacgtttgtccatccggttccaaaacatatggataccacgcaagggtacatccttatgccggtgcatgtattcccggatggcaaggacaaaagacatgctgctccgcattgccattctttcctgcgtgatgggggtgaatacataatccatattgattacggactggaatacaccgggcacatttacggtacccggaaggtcaaaaaggacaagatcataatccagctccgatttttcaagaaagcgtccggccgtttcccgggcttcttccggagtggagttcaggatgctgtaggctttcctaccgcttgctccgaactgttccaccagctggttttgcagatgcacgttcttctcaatgtttcccacttcccagttccgcatggtactgatgctgtgctgtggataatcacaatccaccaccagtacgttataccccttcaggtaatggaagtaactggcgagcaataccgtgaacgtggattttcccacaccgcctttctggttgctcaaagcgacaaataaaggttctttcttcataggcttgaatttagagtgtataatttgtttcatatctgtccggattttttcgtttcatcacacggcaatgcatccgttggtatacggcaatgacgcattgtttgccggtttgcatgaatacattgcataccatattgcaccagtgtaataccggttgccgatgggcattgccatataaggtgcattgcattcatgcaatatggggttcaatgtatcccatactgcattgcacggatgcaatgtattccgtcatgcaggattgtcgtgcagcatatatggcattgcacatatatggatgatgccgcattcacaccatgcaccacctgtggcaggcaagcaataccccttacaggacaatgtttcaatgtatgccctcatgcactgtgccaaaagtagcggctatttttgaaacttccaccaacatttcccctacctgacatcagatgtcatcagatgtcatcaaatgtcatatcaaacgctgtttaccaatcggttatcactgtctaattttgcaaaatcggaatcagacgatggaaaagaactgacttcgtcggatcacagcgttccgtgaacgtcgcgcagcaatccgacgaaggagggttctctgttcaagcgaacagagcaagttgtgttttcgtccgacaaaaagtcttttgtccgacaaaaacaactagcccggctaaaagccgggggaatccgctccaaagtcgcggattccggaagagaaaaaagtacaaaccaaaaatctcatgtgcatggagaaaacaacagggacaaggacgggcagaaagcccaagagtgatccggcggaccgcaagtacagcttccgcctgaacgccgaggagaacacaagatttgaaaaattgctggcggattcgggagccggggaccgcacgctgttcatcaagaaatccatcttttcgggacagattaaagttgtgaaaatcgacaaggcgacaatggactactacatcaaactgaccgaattccacaggcagtttcaggccgtcggaaacaactacaatcaggttgtccggaccttgaagaacaatttcggggaaaaacgtgcgatggcattgctctacaggttggagaaactgagcatcgaactgatgcttgtatgtaaaaaagtcatggtgctaacccaggaatacgagcggaaatggttgcaaaaataagtcacggaacaagcctttacggagcacttgcctataactacgacaaggtaacggcaggtaccgccgagattctttcgggcaaccgcatgatttccgacagattgggattgcccagtgaggacatacgtctggcattgctctcttttgagaactacctgctggcaaaccgcaatacggagaagcccgtcctgcatatctccctttctccggcaccggaagaccagctgactgatgggcaattggtagagttggcggaacggtatatgcagaaaatgggctatgggaatcagccgtacatagcctacaaacatgccgatacccataatgcccacattcatatcgtcagtgtctgtgtagacggacagggaaaaaagatcagtgacgcctacgagcaccgccgttccatgaccgcctgtcgggaactggaaacggatttcggcttgcgcaacggagcggacacggaaaggcggaatccgaaagcggaactaaaaaaggtggatgcttccttgggggatgtccgccatcaggtaggcaacacccttaaagccgtactggaaagctaccgtttccagactttcggggaatacagcgcactgctttccacactcaacatcgaggcgaaacaggtcaggggggagtacaccggcataccctacaccggcattgtctattctgccacggatgataccggcaaggtggtcagtccgccgttcaagagttcacgtttcggaaaacgcttcgggaatgaactgttggaaaagcggatgttgatgaatctgaaagctctcaaagagggaaaatgggcaccctccatacaggcggacatcgcccgtgccttgcggcaggcggattcacggaaacggtttgtggaactgctggggcaaaaaaatatcgatgtggtgttccgtgagaatgagcggggacgtatctacggtgtcaccttcattgaccacgaccgacgggaagtgttcaacggttcacgcatgggcaaggagttttccgccaatgtgttcaacgactatttcaaatggttggaaaacatacccgaaaaggaacggggcggacattccgctacagaacttcggcagcatcaccgccacgaatccggcagcacgctcgaactggcggcgggcatactttcgatggaaaccaacccgcgtgactatgaggaggaagcctttgcacgccgcatgaagaaaaagaagaagaccggacgcaaacgtggcatttagacaaaacaagtatcaacccatttatatacaattcttatgcagcaggaagacgatttgagggcgcttgccaagatcatggaatttggcagggccgtgagtatttttcttttggtggtacacgtctatgtgtattgttatccgagtatcaccacgtggcacttgaaccttgcggtgatggacaggattctggtgaatttcaataatacgaccgggattttcaactgcattctctggagcaaactgttggcagtgcttctgctggccgtttcctgtctgggtacgcacggagtcaaaggtgaaaagataacctggcctaaaatttatgcggcgctggtggcaggatgcgcactgttctttctaaactggtggttgcttgagctgccattgccgcacgcggcaaataccgcattctatatttttactcttacggcaggctatctcgccctgctgatgtcggggctatggatgagccgcctttacaggcacaacctcatggaagatgtgttcaatatggaaaatgagagtttcatgcaggaaacccgactgatggagaatgagtattcggtaaatctcccaacgagattctattataaaaaacgctggaataacggatttgtcaatattgtcaatattttccgtgcctgcatggttatcgggacaccaggtagcggcaagtcctatgcgatagtcaacagttacatacgccagcttatagccaagggctttgcgatttacatctacgattacaagtttgatgacctgtccaccatagcctataattctttgttgaagaatatggacaagtacgaggtcaagccccggttctatgtcataaatttcgacgatccgcgcaggtctcaccgatgcaatcctatcaatccggaatttatgacggacatttccgatgcgtacgaggcgagctatacgataatgctcaacctcaatcgcacctggattgaaaagcagggtgacttttttgtagaatcccccatcattctgcttgctgcaataatctggtatttgaagatttacaagaacgggatttattgtacgttcccgcatgcggtggaattactgaacaagccttattcggacctgttcaccgtcctgacttcctatccggagttggaaaactacctttctcctttcatggatgcatggaaaggaggggcgcaggatcagctccagggccagattgcttcggcaaaaatcccccttacgcgtatgatttccccacaactatactgggtgatgacaggaaatgatttttcgttggatatcaacaatccgaaagaacccaaattactttgtgtcggcaacaatccggacaggcagaacatctattcggctgcactcggactatataattcccgtattgtcaaacttatcaacaagaaaagacagctcaaatgtgccgtaatcatcgatgagcttcccaccatttatttccgggggcttgacaatctgattgcaacggcacgaagcaacaaggtgggcgtacttttgggttttcaggatttcagccagctgacccgcgattatggtgaaaaggagtccaaggttattcagaacacggtaggaaatatattcagcgggcaggtggtcggagaaaccgcaaagacactttctgaacgcttcggcaaggtgctccagcagcgtcagtccgtttccatcaaccgtcaggatgtttccacttccatcaacacgcagcttgactcgcttatcccggcatccaagattgccaatctgtcgcaaggtacgtttgtcggggctgtggcggataattttggcgagaagatagaacagaaaatattccatgccgaaattgttgtagaccatgcggcggtcagtgcggaagaaaaggcctacaggaaaatccctttcatcaacgaattcaaggacaaggacggtaatgacatcatgatgcagcagattcagcgtaactacgaccagatcaagtcggacgcgcaggccatcatcaacgaagagatgggccgtatcaaaaacgatccggagttatgcaagcgattggggctggataatgaaaaaacatccaagaaggagtaatccttcctctcattaaatatcaagatgaagtgtgtggggggattttcccatcaatttcccccacatattattaggtcggagctctgcaataggggtattcctttcatctacttcccgaactccacgacaatctccgtcacttccccatgtactctccgcacattcagcacccgtgcaggaatcccatggttgaagcagcattggataaattccattccgatgaacactcctgtattgtattcccctgtatcgttcttcgtgtttttgcagaaagttacggttcctttcatcttttcattccttctcttgcggtattgcgcttccttttcaaacatcataaagacttctcctctgacaatctgcacctgttggccttcggtttgtaggaattgcaggtaactttccagcaggtcttccgggcatccgctatgggatagcatgtttcttatcccttgtatctgaatcgaattttccattgctttttatttggctatgattatctttttatccttgatgacaagtgtgtctttcccgccatgattcgtcaggcttacatccttcaagtcaatacggctgttggaaatggaaaactcctgatgaatcgtatcgttccgcaggaagtggatgtcctgtttgtacaggttcggaatggaaaagaacagggctatgattccgcccatgcagcataccatcaacagtgtaaaggcaacaaaccaccgctggtattttctgtcatccaaaaccttcac
